(19) United States
(12) Patent Application Publication
(10) Pub. No.: US 2002/0137160 A1
(43) Pub. Date: Sep. 26, 2002

(54) Nucleic acid and other molecules associated with lactation and muscle and fat deposition

(76) Inventors: John C. Byatt, Ballwin, MO (US); Nagappan Mathialagan, Ballwin, MO (US); Nengbing Tao, O'Fallon, MO (US); Wesley C. Warren, Chesterfield, MO (US)

Correspondence Address: ARNOLD & PORTER, IP DOCKETING DEPARTMENT; RM 1126(b), 555 12TH STREET, N.W., WASHINGTON, DC, 20004-1206, US

(21) Appl. No.: 09/983,965

(22) Filed: Oct. 26, 2001

Related U.S. Application Data
(63) Continuation of application No. 09/465,231, filed on Dec. 15, 1999.
(60) Provisional application No. 60/113,678, filed on Dec. 17, 1998.

(51) Int. Cl. C12N 9/00; C12Q 1/68; C07H 21/04; C12P 21/02; C12N 5/06; C12N 5/04; C12N 1/21; C12N 1/16; C12N 1/18

(52) U.S. Cl. 435/183; 435/6; 435/69.1; 435/325; 435/410; 435/252.3; 435/254.2; 536/23.2

(57) ABSTRACT

The present invention is in the field of bovine biochemistry and genetics. More specifically the invention relates to nucleic acid sequences from cattle, in particular, nucleic acid sequences associated with lactation and muscle and fat deposition. The invention encompasses nucleic acid molecules that encode proteins and fragments of proteins. In addition, the invention also encompasses proteins and fragments of proteins so encoded and antibodies capable of binding these proteins or fragments. The invention also relates to methods of using the nucleic acid molecules, proteins and fragments of proteins, and antibodies, for example for genome mapping, gene identification and analysis, cattle breeding, preparation of constructs for use in cattle gene expression, and genetically improved cattle.

### CROSS-REFERENCE TO RELATED APPLICATIONS

[0001] This application claims priority under 35 U.S.C §119(e) of application Ser. No. 60/113,678, filed Dec. 17, 1998, the entirety of which is herein incorporated by reference.

### FIELD OF THE INVENTION

[0002] The present invention is in the field of bovine biochemistry and genetics. More specifically the invention relates to nucleic acid sequences from cattle, in particular, nucleic acid sequences associated with lactation and muscle and fat deposition. The invention encompasses nucleic acid molecules that encode proteins and fragments of proteins. In addition, the invention also encompasses proteins and fragments of proteins so encoded and antibodies capable of binding these proteins or fragments. The invention also relates to methods of using the nucleic acid molecules, proteins and fragments of proteins, and antibodies, for example for genome mapping, gene identification and analysis, cattle breeding, preparation of constructs for use in cattle gene expression, and genetically improved cattle.

### BACKGROUND OF THE INVENTION

[0003] I. Bovine Genetics and Biochemistry

[0004] Various tissues comprised of numerous cell types support a homeostatic system. Homeostasis is defined as the internal environment naturally maintained by responses to support survival. These responses to metabolic demand during growth and lactation are essential for optimal productivity in bovine. More specifically, physiological states such as lactation, muscle and fat deposition require pathway interaction to ensure homeostasis.

[0005] All female mammals are able to produce milk to feed their young; it is this ability which defines the order Mammalia. Milk is produced by a specialized exocrine organ called the mammary gland. This organ differs greatly in morphology depending on the species, but in general it is comprised of the same basic cell types. The secretory cells are of epithelial origin and during lactation are typically organized in a branching ductal structure with terminal alveoli. Mammary epithelial cells form tight junctions between themselves during lactation which prevents the passive diffusion of macromolecules from the milk into blood and vice versa. The secretory cells orient themselves on a basal matrix and only secrete milk components from their apical surface, into the alveolar lumen. The epithelial cells of the alveoli and smaller ducts are surrounded on the outer surface by a network of contractile myoepithelial cells. These cells help to squeeze accumulated milk out of the alveolar lumen during suckling (or milking in dairy animals). This activity is controlled by the endocrine action of oxytocin, which is released from the posterior pituitary during the suckling/milking process. Together the epithelial and myoepithelial cells form the parenchyma. The other major cell types present in mammary gland are fibroblasts and adipocytes which form the stroma and which to varying degrees, surrounds the ducts and alveoli. Although the fibroblasts and adipocytes don't directly synthesize milk components, these cells interact with the parenchymal cells and influence the development of the mammary gland. The stroma lays down much of the matrix required for correct function of the epithelial cells as well as generating the connective tissue that supports the gland in species such as the dairy cow. It has been reported that the stromal and parenchymal components of the mammary gland regulate each other by secretion of paracrine factors. Finally, as with all tissues, there are endothelial cells which make up the vessels and capillaries which supply the gland with blood as well as blood cells themselves. Mammary secretion (and thus mammary tissue) also normally contains leukocytes (25,000 to 100,000/ml) which help to prevent bacterial infection of the gland. However, the number of leukocytes present in the tissue increases dramatically in the event of bacterial infection (mastitis). Thus, a cDNA library prepared from mammary gland will contain copies of messages expressed not only by the predominant epithelial cells, but also by fibroblastic, endothelial and hematopoietic cells.

[0006] Unlike most organs, the mammary gland is only required to function periodically. In consequence, it has a number of well defined stages of development in addition to lactation. In general, the mammary gland is rudimentary in juvenile females and displays isometric growth up until puberty. At the onset of puberty, under the influence of steroids produced by the ovaries, the parenchymal portion of the gland grows more rapidly than the rest of the body (allometric growth). Usually there is little additional growth of the mammary gland until pregnancy. The majority of mammary growth (mammogenesis) occurs during pregnancy in preparation for providing milk for the neonate(s). Differentiation of the epithelial cells into secretory cells also occurs during late gestation into the earlypostpartum period. This process of differentiation, during which dramatic changes in the morphology of cells occurs as they acquire the capacity to synthesize milk specific components, is often referred to as lactogenesis. During lactation or galactopoiesis, the composition of the secretion will often change to best suit the needs of the neonate. The composition of the milk, the degree of change in composition and the length of the lactation varies greatly by species. However, the milk of most species is composed primarily of water which contains sugar (galactose), proteins and fat globules. At the conclusion of lactation, when the young are weaned (or the animal is no longer milked) the gland undergoes a process of involution. During involution the epithelial cells dedifferentiate and lose their ability to make milk specific components and in some species the epithelial cells undergo programmed cell death. Thus, the messages expressed by the mammary gland vary greatly depending on the stage of development of the gland.

[0007] The function of the mammary gland is regulated by endocrine signals that ensure that it normally only secretes milk for a period following the birth of the neonate. Endocrine hormones regulate the processes of mammogenesis, lactogenesis, galactopoiesis and to some degree involution. Growth of the gland is controlled in large part by ovarian steroids (estrogen and progesterone), but is also regulated by somatotropin secreted by the pituitary and perhaps by placental lactogen produced by the feto-placental unit during pregnancy. Lactogenesis is regulated by many hormones including progesterone and corticosteroids, but in all species so far studied, pituitary prolactin is essential for initiating differentiation of the mammary gland. Pituitary hormones also control galactopoiesis, most species are dependent on the presence of prolactin for continued lactation, whereas in domestic ruminants, somatotropin appears to play a larger role in maintaining lactation.

[0008] During lactation, the amount of milk produced by the mammary gland is a function of two variables. First, the number of epithelial cells present in the gland; the greater the number of secretory cells, the greater the volume of milk that can be produced. Second, the average secretory activity of each of the epithelial cells. The number of epithelial cells is regulated by two processes; cell proliferation and cell death. Furthermore, cell death can be due to cell damage, such as damage caused by mastitic infection or by programmed cell death (apoptosis) that occurs in the mammary gland of many species at involution. These two processes have been reported to be carried out concurrently in certain species. If they are in balance, cell number will remain constant, whereas if new cells are being produced more rapidly through cell proliferation than are dying through the process of apoptosis, then total cell number in the gland will increase. The average secretory activity of secretory cells may also be affected by a number of factors. Administration of bovine somatotropin to lactating dairy cattle increases milk yield by increasing the average output per secretory cell. Histologic examination of lactating bovine mammary tissue reveals that often the tissue is not homogeneous in its degree of differentiation. While some clusters of alveoli appear to be fully differentiated and engorged with milk products, adjacent alveoli may display very little secretory morphology.

[0009] Lactation in many species, particularly dairy cattle that have been specifically bred for high milk production, requires that a significant portion of ingested energy and metabolites are directed towards milk synthesis. In high producing dairy animals, a dramatic shift in metabolism occurs during the first few weeks of lactation in order to provide sufficient metabolites for milk synthesis. In cattle, gluconeogenesis in the liver provides the majority of glucose required for mammary lactose synthesis. This organ also breaks down nonesterified fatty acids as an additional energy source if there is insufficient acetate and volatile fatty acids coming from digestion. The metabolism of muscle and adipose tissue is also modulated during lactation and by hormones such as bovine somatotropin that stimulate galactopoiesis. Thus, the responsiveness of lactating dairy cows to bovine somatotropin is determined in part by how effectively gluconeogenesis in muscle tissue is down-regulated, and also by a shift in the ratio of lipogenesis to lipolysis in adipose tissue.

[0010] Examination of growth in mammalian species has produced a large array of literature. The manipulation of livestock through the use of diet and productivity enhancers has been reviewed (Boorman et al. (eds), The Control of Fat and Lean Deposition, Butterworths, London (1992)). Literature on meat producing animals has focused on muscle growth. Skeletal muscle is needed for locomotion and as a ready reservoir of protein storage for the animal, and is considered a good source of protein for dietary consumption. A balance is maintained between protein synthesis and degradation for optimal muscle growth. For protein synthesis, the process of translation proceeds through three steps 1) formation of the initiation complex that contains two ribosome units, 2) peptide chain elongation and 3) the process of termination. These stages are controlled by the hormonal milieu present during a specific development timeline.

[0011] Muscle itself is composed of numerous cell types such as fibroblasts, adipocytes, endothelial cells, mononucleate satellite cells and muscle fibers. Of these the muscle fibers comprise the majority of muscle protein. Muscle fibers form by the fusion of mononucleate cells, which at that point make differentiation irreversible. Mature fibers range in size from a hundred microns to several centimeters in length. Within muscle fibers the existence of two distinct muscle cell populations, the fused and unfused, make the delineation of hypertrophy (cell enlargement) and hyperplasia (cell number) difficult to study.

[0012] The patterns of muscle cell development can be divided into embryonic, fetal and postnatal patterns. During embryonic development, precursor myogenic cells undergo a series of differentiation states which ultimately define their muscle cell lineage. Certain genes are temporally expressed for defined muscle cell lineage. For example, genes encoding a family of DNA binding proteins transform fibroblasts to myoblasts (Braun et al., EMBO Journal 9:821-831 (1990)). Moreover, the ski gene expressed in genetically improved mice demonstrates a hypertrophied muscle phenotype. A knockout of myostatin, a member of the TGF beta family, exhibited muscle hypertrophy. Also, this population of cells remains capable of proliferation and differentiation in response to injury.

[0013] In placental mammals, the number of muscle fibers is fixed at birth or shortly thereafter, depending on the species. These muscle satellite cells are abundant in the young animal and decrease with age. Once muscle cell growth slows in the adult animal, fat deposition accelerates. Fat accretion occurs in a non-random manner at distinct sites such as in the abdominal cavity, under the skin and between and within muscle fibers. These fat deposits serve a variety of functions in addition to their role in energy supply. For example, the mammary gland is dependent on fat for growth.

[0014] II. Sequence Comparisons

[0015] A DNA sequence can be compared with other DNA sequences to determine homology. Sequence comparisons can be undertaken by determining the similarity of the test or query sequence with sequences in publicly available or proprietary databases (“similarity analysis”) or by searching for certain motifs (“intrinsic sequence analysis”)(e.g. cis elements) (Coulson, Trends in Biotechnology 12:76-80 (1994), the entirety of which is herein incorporated by reference); Birren et al., Genome Analysis 1: Cold Spring Harbor Laboratory Press, Cold Spring Harbor, New York 543-559 (1997), the entirety of which is herein incorporated by reference).

[0016] Similarity analysis includes database search and alignment. Examples of public 1: databases include the DNA Database of Japan (DDBJ)(http://www.ddbi.nig.ac.ip/); Genebank (http:flwww.ncbi.nlm.nih.gov/Web/Search/Index.htlm); and the European Molecular Biology Laboratory Nucleic Acid Sequence Database (EMBL) (http://www.ebi.ac.uk/ebi_docs/embl db/embl-db.html). Other appropriate databases include dbEST (http://www.ncbi.nlm.nih.gov/dbEST/index.html), SwissProt (http://www.ebi.ac.uklebi_docs/swisprot_db/swisshome.html), PIR (http://www-nbrt. georgetown.edu/pir/) and The Institute for Genome Research (http://www.tigr.org/tdb/tdb.html).

[0017] A number of different search algorithms have been developed, one example of which are the suite of programs referred to as BLAST programs. There are five implementations of BLAST, three designed for nucleotide sequences queries (BLASTN, BLASTX, and TBLASTX) and two designed for protein sequence queries (BLASTP and TBLASTN) (Coulson, Trends in Biotechnology 12:76-80 (1994); Birren et al., Genome Analysis 1: Cold Spring Harbor Laboratory Press, Cold Spring Harbor, New York 543-559 (1997)).

[0018] BLASTN takes a nucleotide sequence (the query sequence) and its reverse complement and searches them against a nucleotide sequence database. BLASTN was designed for speed, not maximum sensitivity, and may not find distantly related coding sequences. BLASTX takes a nucleotide sequence, translates it in three forward reading frames and three reverse complement reading frames, and then compares the six translations against a protein sequence database. BLASTX is useful for sensitive analysis of preliminary (single-pass) sequence data and is tolerant of sequencing errors (Gish and States, Nature Genetics 3:266-272 (1993), the entirety of which is herein incorporated by reference). BLASTN and BLASTX may be used in concert for analyzing EST data (Coulson, Trends in Biotechnology 12:76-80 (1994); Birren et al., Genome Analysis 1:543-559 (1997)).

[0019] Given a coding nucleotide sequence and the protein it encodes, it is often preferable to use the protein as the query sequence to search a database because of the greatly increased sensitivity to detect more subtle relationships. This is due to the larger alphabet of proteins (20 amino acids) compared with the alphabet of nucleic acid sequences (4 bases), where it is far easier to obtain a match by chance. In addition, with nucleotide alignments, only a match (positive score) or a mismatch (negative score) is obtained, but with proteins, the presence of conservative amino acid substitutions can be taken into account. Here, a mismatch may yield a positive score if the non-identical residue has physical/chemical properties similar to the one it replaced. Various scoring matrices are used to supply the substitution scores of all possible amino acid pairs. A general purpose scoring system is the BLOSUM62 matrix (Henikoff and Henikoff, Proteins 17:49-61(1993), the entirety of which is herein incorporated by reference), which is currently the default choice for BLAST programs. BLOSUM62 is tailored for alignments of moderately diverged sequences and thus may not yield the best results under all conditions. Altschul, J. Mol. Biol. 36:290-300 (1993), the entirety of which is herein incorporated by reference, describes a combination of three matrices to cover all contingencies. This may improve sensitivity, but at the expense of slower searches. In practice, a single BLOSUM62 matrix is often used but others (PAM40 and PAM250) may be attempted when additional analysis is necessary. Low PAM matrices are directed at detecting very strong but localized sequence similarities, whereas high PAM matrices are directed at detecting long but weak alignments between very distantly related sequences.

[0020] Homologues in other organisms are available for comparative sequence analysis. Multiple alignments are performed to study similarities and differences in a group of related sequences. CLUSTAL W is a multiple sequence alignment package that performs progressive multiple sequence alignments based on the method of Feng and Doolittle, J. Mol. Evol. 25:351-360 (1987), the entirety of which is herein incorporated by reference. Each pair of sequences is aligned and the distance between each pair is calculated; from this distance matrix, a guide tree is calculated, and all of the sequences are progressively aligned based on this tree. A feature of the program is its sensitivity to the effect of gaps on the alignment; gap penalties are varied to encourage the insertion of gaps in probable loop regions instead of in the middle of structured regions. Users can specify gap penalties, choose between a number of scoring matrices, or supply their own scoring matrix for both pairwise alignments and multiple alignments. CLUSTAL W for UNIX and VMS systems is available at: ftp.ebi.ac.uk. Another program is MACAW (Schuler et al., Proteins Struct. Func. Genet. 9:180-190 (1991), the entirety of which is herein incorporated by reference, for which both Macintosh and Microsoft Windows versions are available. MACAW uses a graphical interface, provides a choice of several alignment algorithms, and is available by anonymous ftp at: ncbi.nlm.nih.gov (directory/pub/macaw).

[0021] Sequence motifs are derived from multiple alignments and can be used to examine individual sequences or an entire database for subtle patterns. With motifs, it is sometimes possible to detect distant relationships that may not be demonstrable based on comparisons of primary sequences alone. Currently, the largest collection of sequence motifs in the world is PROSITE (Bairoch and Bucher, Nucleic Acid Research 22:3583-3589 (1994), the entirety of which is herein incorporated by reference). PROSITE may be accessed via either the ExPASy server on the World Wide Web or anonymous ftp site. Many commercial sequence analysis packages also provide search programs that use PROSITE data.

[0022] A resource for searching protein motifs is the BLOCKS E-mail server developed by Henikoff, Trends Biochem Sci. 18:267-268 (1993), the entirety of which is herein incorporated by reference; Henikoff and Henikoff, Nucleic Acid Research 19:6565-6572 (1991), the entirety of which is herein incorporated by reference; Henikoff and Henikoff, Proteins 17:49-61 (1993). BLOCKS searches a protein or nucleotide sequence against a database of protein motifs or “blocks.” Blocks are defined as short, ungapped multiple alignments that represent highly conserved protein patterns. The blocks themselves are derived from entries in PROSITE as well as other sources. Either a protein query or a nucleotide query can be submitted to the BLOCKS server; if a nucleotide sequence is submitted, the sequence is translated in all six reading frames and motifs are sought for these conceptual translations. Once the search is completed, the server will return a ranked list of significant matches, along with an alignment of the query sequence to the matched BLOCKS entries.

[0023] Conserved protein domains can be represented by two-dimensional matrices, which measure either the frequency or probability of the occurrences of each amino acid residue and deletions or insertions in each position of the domain. This type of model, when used to search against protein databases, is sensitive and usually yields more accurate results than simple motif searches. Two popular implementations of this approach are profile searches such as GCG program ProfileSearch and Hidden Markov Models (HMMs)(Krough et al., J. Mol. Biol. 235:1501-1531, (1994); Eddy, Current Opinion in Structural Biology 6:361-365, (1996), both of which are herein incorporated by reference in their entirety). In both cases, a large number of common protein domains have been converted into profiles, as present in the PROSITE library, or HHM models, as in the Pfam protein domain library (Sonnhammer et al., Proteins 28:405-420 (1997), the entirety of which is herein incorporated by reference). Pfam contains more than 500 HMM models for enzymes, transcription factors, signal transduction molecules, and structural proteins. Protein databases can be queried with these profiles or HMM models, which will identify proteins containing the domain of interest. For example, HMMSW or HMMFS, two programs in a public domain package called HMMER (Sonnhammer et al., Proteins 28:405-420 (1997)) can be used.

[0024] PROSITE and BLOCKS represent collected families of protein motifs. Thus, searching these databases entails submitting a single sequence to determine whether or not that sequence is similar to the members of an established family. Programs working in the opposite direction compare a collection of sequences with individual entries in the protein databases. An example of such a program is the Motif Search Tool, or MoST (Tatusov et al., Proc. Natl. Acad. Sci. (U.S.A.) 91:12091-12095 (1994), the entirety of which is herein incorporated by reference). On the basis of an aligned set of input sequences, a weight matrix is calculated by using one of four methods (selected by the user). A weight matrix is simply a representation, position by position of the probability that a particular amino acid will appear. The calculated weight matrix is then used to search the databases. To increase sensitivity, newly found sequences are added to the original data set, the weight matrix is recalculated, and the search is performed again. This procedure continues until no new sequences are found.

### SUMMARY OF THE INVENTION

[0025] The present invention provides a substantially purified nucleic acid molecule, the nucleic acid molecule capable of specifically hybridizing to a second nucleic acid molecule, the second nucleic acid having a nucleic acid sequence selected from the group consisting of SEQ ID NO: 1 through SEQ ID NO: 5,912 or complements thereof.

[0026] The present invention also provides a substantially purified nucleic acid molecule according to claim 1, the nucleic acid molecule having a nucleic acid sequence selected from the group consisting of SEQ ID NO: 1 through SEQ ID NO: 5,912 or complements thereof of fragments of either.

[0027] The present invention also provides a substantially purified bovine protein or fragment thereof encoded by a nucleic acid molecule, the nucleic acid molecule capable of specifically hybridizing to a second nucleic acid molecule, the second nucleic acid molecule having a nucleic acid sequence selected from the group consisting of SEQ ID NO: 1 through SEQ ID NO: 5,912 or fragment thereof.

[0028] The present invention also provides a substantially purified antibody or fragment thereof, the antibody or fragment thereof capable of specifically binding to bovine protein or fragment thereof encoded by a nucleic acid molecule, the nucleic acid molecule capable of specifically hybridizing to a second nucleic acid molecule, the second nucleic acid molecule having a nucleic acid sequence selected from the group consisting of SEQ ID NO: 1 through SEQ ID NO: 5,912 or fragment thereof.

[0029] The present invention also provides a transformed cell having a nucleic acid molecule which comprises: (A) an exogenous promoter region which functions in the cell to cause the production of a MRNA molecule; which is linked to (B) a structural nucleic acid molecule encoding a bovine protein or fragment thereof, the structural nucleic acid molecule capable of specifically hybridizing to a second nucleic acid molecule, the second nucleic acid molecule having a nucleic acid sequence selected from the group consisting of a complement of SEQ ID NO: 1 through SEQ ID) NO: 5,912; which is linked to (C) a 3′ non-translated sequence that functions in the cell to cause termination of transcription and addition of polyadenylated ribonucleotides to a 3′ end of the MRNA molecule.

[0030] The present invention also provides a bovine having an exogenous nucleic acid molecule, the exogenous nucleic acid molecule comprising: (A) an exogenous promoter region which functions in the cell to cause the production of a mRNA molecule; which is linked to (B) a structural nucleic acid molecule encoding a bovine protein or fragment thereof, the structural nucleic acid molecule capable of specifically hybridizing to a second nucleic acid molecule, the second nucleic acid molecule having a nucleic acid sequence selected from the group consisting of a complement of SEQ ID NO: 1 through SEQ ID NO: 5,912, which is linked to (C) a 3′ non-translated sequence that functions in the cell to cause termination of transcription and addition of polyadenylated ribonucleotides to a 3′ end of the mRNA molecule.

[0031] The present invention also provides a computer readable medium having recorded thereon one or more of the nucleotide sequences depicted in SEQ ID NO: 1 through SEQ ID NO: 5,912 or complements thereof.

[0032] The present invention also provides a method for determining a level or pattern of a molecule in a bovine cell or tissue comprising: (A) incubating, under conditions permitting nucleic acid hybridization, a marker nucleic acid molecule, the marker nucleic acid molecule comprising a nucleic acid sequence selected from the group consisting of SEQ ID NO: 1 through SEQ ID NO: 5,912 or complements thereof or fragment of either, with a complementary nucleic acid molecule obtained from the bovine cell or tissue, wherein nucleic acid hybridization between the marker nucleic acid molecule and the complementary nucleic acid molecule obtained from the bovine cell or tissue permits the detection of the molecule; (B) permitting hybridization between the marker nucleic acid molecule and the complementary nucleic acid molecule obtained from the bovine cell or tissue; and (C) detecting the level or pattern of the complementary nucleic acid, wherein the detection of the complementary nucleic acid is predictive of the level or pattern of molecule.

[0033] The present invention also provides a method for determining a level or pattern of a protein in a bovine cell or tissue under evaluation which comprises assaying the concentration of a molecule, whose concentration is dependent upon the expression of a gene, the gene specifically hybridizes to a nucleic acid molecule comprising a nucleic acid sequence selected from the group consisting of SEQ ID NO: 1 through SEQ ID NO: 5,912 or complements thereof, in comparison to the concentration of that molecule present in a reference bovine cell or tissue with a known level or pattern of the protein, wherein the assayed concentration of the molecule is compared to the assayed concentration of the molecule in the reference bovine cell or tissue with the known level or pattern of the protein.

[0034] The present invention also provides a method for determining a mutation in a bovine whose presence is predictive of a mutation affecting the level or pattern of a protein comprising the steps: (A) incubating, under conditions permitting nucleic acid hybridization, a marker nucleic acid molecule, the marker nucleic acid molecule comprising a nucleic acid molecule that is linked to a gene, the gene specifically hybridizes to a nucleic acid molecule comprising a nucleic acid sequence selected from the group consisting of SEQ ID NO: 1 through SEQ ID NO: 5,912 or complements thereof and a complementary nucleic acid molecule obtained from the bovine, wherein nucleic acid hybridization between the marker nucleic acid molecule and the complementary nucleic acid molecule obtained from the bovine permits the detection of a polymorphism whose presence is predictive of a mutation affecting the level or pattern of the protein in the bovine; (B) permitting hybridization between the marker nucleic acid molecule and the complementary nucleic acid molecule obtained from the bovine; and (C) detecting the presence of the polymorphism, wherein the detection of the polymorphism is predictive of the mutation.

[0035] The present invention also provides a method of determining an association between a polymorphism and a bovine trait comprising: (A) hybridizing a nucleic acid molecule specific for the polymorphism to genetic material of a bovine, wherein the nucleic acid molecule has a nucleic acid sequence selected from the group consisting of SEQ ID NO: 1 through SEQ ID NO: 5,912 or complements thereof or fragment of either; and (B) calculating the degree of association between the polymorphism and the bovine trait.

[0036] The present invention also provides a method of isolating a nucleic acid that encodes a protein or fragment thereof comprising: (A) incubating under conditions permitting nucleic acid hybridization, a first nucleic acid molecule comprising a nucleic acid sequence selected from the group consisting of SEQ ID NO: 1 through SEQ ID NO: 5,912 or complements thereof or fragment of either with a complementary second nucleic acid molecule obtained from a bovine cell or tissue; (B) permitting hybridization between the first nucleic acid molecule and the second nucleic acid molecule obtained from the bovine cell or tissue; and (C) isolating the second nucleic acid molecule.

### DETAILED DESCRIPTION OF THE INVENTION

[0037] Agents of the Present Invention

[0038] (a) Nucleic Acid Molecules

[0039] Agents of the present invention include mammalian nucleic acid molecules, and more specifically include bovine nucleic acid molecules, particularly from the cattle breed Holstein. As used herein, bovine and cattle (cow) are used synomously, and cattle includes dairy and beef cattle. A preferred embodiment is dairy cattle. Another preferred embodiment is ovine.

[0040] A subset of the nucleic acid molecules of the present invention includes nucleic acid molecules that are marker molecules. Another subset of the nucleic acid molecules of the present invention include nucleic acid molecules that encode a protein or fragment thereof. Another subset of the nucleic acid molecules of the present invention are EST molecules.

[0041] Fragment nucleic acid molecules may encode significant portion(s) of, or indeed most of, these nucleic acid molecules. Alternatively, the fragments may comprise smaller oligonucleotides (having from about 15 to about 250 nucleotide residues, and more preferably, about 15 to about 30 nucleotide residues).

[0042] As used herein, an agent, be it a naturally occurring molecule or otherwise may be “substantially purified”, if desired, referring to a molecule separated from substantially all other molecules normally associated with it in its native state. More preferably a substantially purified molecule is the predominant species present in a preparation. A substantially purified molecule may be greater than 60% free, preferably 75% free, more preferably 90% free, and most preferably 95% free from the other molecules (exclusive of solvent) present in the natural mixture. The term “substantially purified” is not intended to encompass molecules present in their native state.

[0043] The agents of the present invention will preferably be “biologically active” with respect to either a structural attribute, such as the capacity of a nucleic acid to hybridize to another nucleic acid molecule, or the ability of a protein to be bound by an antibody (or to compete with another molecule for such binding). Alternatively, such an attribute may be catalytic, and thus involve the capacity of the agent to mediate a chemical reaction or response.

[0044] The agents of the present invention may also be recombinant. As used herein, the term recombinant means any agent (e.g., DNA, peptide etc.), that is, or results, however indirect, from human manipulation of a nucleic acid molecule.

[0045] It is understood that the agents of the present invention may be labeled with reagents that facilitate detection of the agent (e.g. fluorescent labels, Prober et al., Science 238:336-340 (1987); Albarella et al., EP 144914; chemical labels, Sheldon et al., U.S. Pat. No. 4,582,789; Albarella et al., U.S. Pat. No. 4,563,417; modified bases, Miyoshi et al., EP 119448, all of which are hereby incorporated by reference in their entirety).

[0046] It is further understood, that the present invention provides recombinant bovine, bacterial, mammalian, microbial, insect, fungal, plant cell, and viral constructs comprising the agents of the present invention. (See, for example, Uses of the Agents of the Invention, Section (a) Bovine Constructs, Bovine Transformed Cells and Genetically Improved Bovines (b) Non-Bovine Mammalian Constructs, Non-Bovine Transformed Mammalian Cells and Non-Bovine Trangenics; Section (c) Insect Constructs and Transformed Insect Cells; Section (d) Bacterial Constructs and Transformed Bacterial Cells; Section (e) Fungal Constructs and Transformed Fungal Cells; and Section (f) Plant Constructs, Transformed Plant Cells and Plant Transformants).

[0047] Nucleic acid molecules or fragments thereof of the present invention are capable of specifically hybridizing to other nucleic acid molecules under certain circumstances. As used herein, two nucleic acid molecules are said to be capable of specifically hybridizing to one another if the two molecules are capable of forming an anti-parallel, double-stranded nucleic acid structure. A nucleic acid molecule is said to be the “complement” of another nucleic acid molecule if they exhibit complete complementarity. As used herein, molecules are said to exhibit “complete complementarity” when every nucleotide of one of the molecules is complementary to a nucleotide of the other. Two molecules are said to be “minimally complementary” if they can hybridize to one another with sufficient stability to permit them to remain annealed to one another under at least conventional “low-stringency” conditions. Similarly, the molecules are said to be “complementary” if they can hybridize to one another with sufficient stability to permit them to remain annealed to one another under conventional “high-stringency” conditions. Conventional stringency conditions are described by Sambrook et al., Molecular Cloning, A Laboratory Manual, 2nd Ed., Cold Spring Harbor Press, Cold Spring Harbor, New York (1989), and by Haymes et al. Nucleic Acid Hybridization, A Practical Approach, IRL Press, Washington, D.C. (1985), the entirety of which is herein incorporated by reference. Departures from complete complementarity are therefore permissible, as long as such departures do not completely preclude the capacity of the molecules to form a double-stranded structure. Thus, in order for a nucleic acid molecule to serve as a primer or probe it need only be sufficiently complementary in sequence to be able to form a stable double-stranded structure under the particular solvent and salt concentrations employed.

[0048] Appropriate stringency conditions which promote DNA hybridization, for example, 6.0×sodium chloride/sodium citrate (SSC) at about 45° C., followed by a wash of 2.0×SSC at 50° C., are known to those skilled in the art or can be found in Current Protocols in Molecular Biology, John Wiley & Sons, N.Y. (1989), 6.3.1-6.3.6. For example, the salt concentration in the wash step can be selected from a low stringency of about 2.0×SSC at 50° C. to a high stringency of about 0.2×SSC at 50° C. In addition, the temperature in the wash step can be increased from low stringency conditions at room temperature, about 22° C., to high stringency conditions at about 65° C. Both temperature and salt may be varied, or either the temperature or the salt concentration may be held constant while the other variable is changed.

[0049] In a preferred embodiment, a nucleic acid of the present invention will specifically hybridize to one or more of the nucleic acid molecules set forth in SEQ ID NO: 1 through SEQ ID NO: 5,912 or complements thereof under moderately stringent conditions, for example at about 2.0×SSC and about 65° C.

[0050] In a particularly preferred embodiment, a nucleic acid of the present invention will include those nucleic acid molecules that specifically hybridize to one or more of the nucleic acid molecules set forth in SEQ ID NO: 1 through SEQ ID NO: 5,912 or complements thereof under high stringency conditions such as 0.2×SSC and about 65° C.

[0051] In one aspect of the present invention, the nucleic acid molecules of the present invention have one or more of the nucleic acid sequences set forth in SEQ ID NO: 1 through to SEQ ID NO: 5,912 or complements thereof. In another aspect of the present invention, one or more of the nucleic acid molecules of the present invention share between 100% and 90% sequence identity with one or more of the nucleic acid sequences set forth in SEQ ID NO: 1 through to SEQ ID NO: 5,912 or complements thereof. In a further aspect of the present invention, one or more of the nucleic acid molecules of the present invention share between 100% and 95% sequence identity with one or more of the nucleic acid sequences set forth in SEQ ID NO: 1 through to SEQ ID NO: 5,912 or complements thereof. In a more preferred aspect of the present invention, one or more of the nucleic acid molecules of the present invention share between 100% and 98% sequence identity with one or more of the nucleic acid sequences set forth in SEQ ID NO: 1 through to SEQ ID NO: 5,912 or complements thereof. In an even more preferred aspect of the present invention, one or more of the nucleic acid molecules of the present invention share between 100% and 99% sequence identity with one or more of the sequences set forth in SEQ ID NO: 1 through to SEQ ID NO: 5,912 or complements thereof.

[0052] In a further more preferred aspect of the present invention, one or more of the nucleic acid molecules of the present invention exhibit 100% sequence identity with a nucleic acid molecule present within the following libraries: LIB13, LIB34, LIB3058, LIB3057, LIB188, and LIB2809 (Monsanto Company, St. Louis, Mo., U.S.A.).

[0053] (i) Nucleic Acid Molecules Encoding Proteins or Fragments Thereof

[0054] Nucleic acid molecules of the present invention can comprise sequences that encode a protein or fragment thereof. Such proteins or fragments thereof include homologues of known proteins in other organisms.

[0055] In a preferred embodiment of the present invention, a bovine protein or fragment thereof of the present invention is a homologue of another bovine protein. In another preferred embodiment of the present invention, a bovine or fragment thereof of the present invention is a homologue of a non-bovine mammalian protein. In another preferred embodiment of the present invention, a bovine protein of the present invention is a homologue of a human protein. In another preferred embodiment of the present invention, a bovine protein or fragment thereof of the present invention is a homologue of a mouse protein. In another preferred embodiment of the present invention, a bovine protein or fragment thereof of the present invention is a homologue of a rat protein. In another preferred embodiment of the present invention, a bovine protein or fragment thereof of the present invention is a homologue of a goat protein. In another preferred embodiment of the present invention, a bovine protein or fragment thereof of the present invention is a homologue of a hamster protein. In another preferred embodiment of the present invention, a bovine protein or fragment thereof of the present invention is a homologue of a pig protein. In another preferred embodiment of the present invention, a bovine protein or fragment thereof of the present invention is a homologue of a fungal protein. In another preferred embodiment of the present invention, a bovine protein or fragment thereof of the present invention is a homologue of a bacterial protein. In another preferred embodiment of the present invention, a bovine protein or fragment thereof of the present invention is a homologue of a viral protein.

[0056] In a preferred embodiment of the present invention, an ovine protein or fragment thereof of the present invention is a homologue of another ovine protein. In another preferred embodiment of the present invention, an ovine or fragment thereof of the present invention is a homologue of a non-ovine mammalian protein. In another preferred embodiment of the present invention, an ovine protein of the present invention is a homologue of a human protein. In another preferred embodiment of the present invention, an ovine protein or fragment thereof of the present invention is a homologue of a mouse protein. In another preferred embodiment of the present invention, an ovine protein or fragment thereof of the present invention is a homologue of a rat protein. In another preferred embodiment of the present invention, an ovine protein or fragment thereof of the present invention is a homologue of a goat protein. In another preferred embodiment of the present invention, an ovine protein or fragment thereof of the present invention is a homologue of a hamster protein. In another preferred embodiment of the present invention, an ovine protein or fragment thereof of the present invention is a homologue of a pig protein. In another preferred embodiment of the present invention, an ovine protein or fragment thereof of the present invention is a homologue of a fungal protein. In another preferred embodiment of the present invention, an ovine protein or fragment thereof of the present invention is a homologue of a bacterial protein. In another preferred embodiment of the present invention, an ovine protein or fragment thereof of the present invention is a homologue of a viral protein.

[0057] In a preferred embodiment of the present invention, the nucleic molecule of the present invention encodes a bovine protein or fragment thereof where a bovine protein exhibits a BLAST probability score of greater than 1E-12, preferably a BLAST probability score of between about 1E-30 and about 1E-12, even more preferably a BLAST probability score of greater than 1E-30 with its homologue.

[0058] In a preferred embodiment of the present invention, the nucleic molecule of the present invention encodes a bovine homologue protein or fragment thereof where a bovine protein exhibits a BLAST score of greater than 120, preferably a BLAST score of between about 1450 and about 120, even more preferably a BLAST score of greater than 1450 with its homologue.

[0059] In another preferred embodiment of the present invention, the nucleic acid molecule encoding a bovine protein or fragment thereof or fragment thereof exhibits a % identity with its homologue of between about 25%and about 40%, more preferably of between about 40 and about 70%, even more preferably of between about 70% and about 90%, and even more preferably between about 90% and 99%. In another preferred embodiment, of the present invention, a bovine protein or fragments thereof exhibits 100% identity with its homologue.

[0060] Nucleic acid molecules of the present invention also include non-bovine homologues. Preferred non-bovine homologues are selected from the group consisting of mammalian homologues. Even more preferred non-bovine homologues are ovine homologues.

[0061] In a preferred embodiment, nucleic acid molecules having SEQ ID NO: 1 through SEQ ID NO: 5,912 or complements and fragments of either can be utilized to obtain such homologues.

[0062] The degeneracy of the genetic code, which allows different nucleic acid sequences to code for the same protein or peptide, is known in the literature (U.S. Pat. No.4,757,006, the entirety of which is herein incorporated by reference).

[0063] In an aspect of the present invention, one or more of the nucleic acid molecules of the present invention differ in nucleic acid sequence from those encoding bovine proteins or fragments thereof in SEQ ID NO: 1 through SEQ ID NO: 5,912 due to the degeneracy in the genetic code in that they encode the same protein but differ in nucleic acid sequence.

[0064] In another further aspect of the present invention, one or more of the nucleic acid molecules of the present invention differ in nucleic acid sequence from those encoding bovine protein or fragment thereof in SEQ ID NO: 1 through SEQ ID NO: 5,912 due to fact that the different nucleic acid sequence encodes a protein having one or more conservative amino acid residue. Examples of conservative substitutions are set forth in Table 1. It is understood that codons capable of coding for such conservative substitutions are known in the art.

TABLE 1

| Original Residue | Conservative Substitutions |
|---|---|
| Ala | Ser |
| Arg | Lys |
| Asn | Gln; His |
| Asp | Glu |
| Cys | Ser; Ala |
| Gln | Asn |
| Glu | Asp |
| Gly | Pro |
| His | Asn; Gln |
| Ile | Leu; Val |
| Leu | Ile; Val |
| Lys | Arg; Gln; Glu |
| Met | Leu; Ile |
| Phe | Met; Leu; Tyr |
| Ser | Thr |
| Thr | Ser |
| Trp | Tyr |
| Tyr | Trp; Phe |
| Val | Ile; Leu |

[0065] In a further aspect of the present invention, one or more of the nucleic acid molecules of the present invention differ in nucleic acid sequence from those encoding a bovine protein or fragment thereof set forth in SEQ ID NO: 1 through SEQ ID NO: 5,912 or fragment thereof due to the fact that one or more codons encoding an amino acid has been substituted for a codon that encodes a nonessential substitution of the amino acid originally encoded.

[0066] (ii) Nucleic Acid Molecule Markers and Probes

[0067] One aspect of the present invention concerns marker nucleic acid molecules. Such marker nucleic acid molecules preferrables include those nucleic molecules comprising SEQ ID NO: 1 through SEQ ID NO: 5,912 or complements thereof or fragments of either or other nucleic acid molecules of the present invention that can act as markers. Genetic markers of the present invention include “dominant” or “codominant” markers. “Codominant markers” reveal the presence of two or more alleles (two per diploid individual) at a locus. “Dominant markers” reveal the presence of only a single allele per locus. The presence of the dominant marker phenotype (e.g., a band of DNA) is an indication that one allele is present in either the homozygous or heterozygous condition. The absence of the dominant marker phenotype (e.g. absence of a DNA band) is merely evidence that “some other” undefined allele is present. In the case of populations where individuals are predominantly homozygous and loci are predominately dimorphic, dominant and codominant markers can be equally valuable. As populations become more heterozygous and multi-allelic, codominant markers often become more informative of the genotype than dominant markers. Marker molecules can be, for example, capable of detecting polymorphisms such as single nucleotide polymorphisms (SNPs).

[0068] SNPs are single base changes in genomic DNA sequence. They occur at greater frequency and are spaced with a greater uniformly throughout a genome than other reported forms of polymorphism. The greater frequency and uniformity of SNPs means that there is greater probability that such a polymorphism will be found near or in a genetic locus of interest than would be the case for other polymorphisms. SNPs are located in protein-coding regions and noncoding regions of a genome. Some of these SNPs may result in defective or variant protein expression (e.g., as a results of mutations or defective splicing). Analysis (genotyping) of characterized SNPs can require only a plus/minus assay rather than a lengthy measurement, permitting easier automation.

[0069] SNPs can be characterized using any of a variety of methods. Such methods include the direct or indirect sequencing of the site, the use of restriction enzymes (Botstein et al., Am. J. Hum. Genet. 32:314-331 (1980), the entirety of which is herein incorporated reference; Konieczny and Ausubel, Plant J. 4:403-410 (1993), the entirety of which is herein incorporated by reference), enzymatic and chemical mismatch assays (Myers et al., Nature 313:495-498 (1985), the entirety of which is herein incorporated by reference), allele-specific PCR (Newton et al., Nucl. Acids Res. 17:2503-2516 (1989), the entirety of which is herein incorporated by reference; Wu et al., Proc. Natl. Acad. Sci. (U.S.A.) 86:2757-2760 (1989), the entirety of which is herein incorporated by reference), ligase chain reaction (Barany, Proc. Natl. Acad. Sci. (U.S.A.) 88:189-193 (1991), the entirety of which is herein incorporated by reference), single-strand conformation polymorphism analysis (Labrune et al, Am. J. Hum. Genet. 48:1115-1120 (1991), the entirety of which is herein incorporated by reference), primer-directed nucleotide incorporation assays (Kuppuswami et al., Proc. Natl. Acad. Sci. USA 88:1143-1147 (1991), the entirety of which is herein incorporated by reference), dideoxy fingerprinting (Sarkar et al., Genomics 13:441-443 (1992), the entirety of which is herein incorporated by reference), solid-phase ELISA-based oligonucleotide ligation assays (Nikiforov et al., Nucl. Acids Res. 22:4167-4175 (1994), the entirety of which is herein incorporated by reference), oligonucleotide fluorescence-quenching assays (Livak et al., PCR Methods Appl. 4:357-362 (1995), the entirety of which is herein incorporated by reference), 5′-nuclease allele-specific hybridization TaqMan assay (Livak et al., Nature Genet. 9:341-342 (1995), the entirety of which is herein incorporated by reference), template-directed dye-terminator incorporation (TDI) assay (Chen and Kwok, Nucl. Acids Res. 25:347-353 (1997), the entirety of which is herein incorporated by reference), allele-specific molecular beacon assay (Tyagi et al., Nature Biotech. 16:49-53 (1998), the entirety of which is herein incorporated by reference), PinPoint assay (Haff and Smrnimov, Genome Res. 7:378-388 (1997), the entirety of which is herein incorporated by reference), and dCAPS analysis (Neff et al., Plant J. 14:387-392 (1998), the entirety of which is herein incorporated by reference).

[0070] Additional markers, such as AFLP markers, RFLP markers, and RAPD markers, can be utilized (Burow and Blake, Molecular Dissection of Complex Traits, 13-29, Paterson (ed.), CRC Press, New York (1988), the entirety of which is herein incorporated by reference). DNA markers can be developed from nucleic acid molecules using restriction endonucleases, the PCR and/or DNA sequence information. RFLP markers result from single base changes or insertions/deletions. These codominant markers are highly abundant, have a medium level of polymorphism and are developed by a combination of restriction endonuclease digestion and Southern blotting hybridization. CAPS are similarly developed from restriction nuclease digestion but only of specific PCR products. These markers are also codominant, have a medium level of polymorphism and are highly abundant in the genome. The CAPS result from single base changes and insertions/deletions.

[0071] Another marker type, RAPDs, are developed from DNA amplification with random primers and result from single base changes and insertions/deletions. They are dominant markers with a medium level of polymorphisms and are highly abundant. AFLP markers require using the PCR on a subset of restriction fragments from extended adapter primers. These markers are both dominant and codominant are highly abundant in genomes and exhibit a medium level of polymorphism.

[0072] SSRs require DNA sequence information. These codominant markers result from repeat length changes, are highly polymorphic, and do not exhibit as high a degree of abundance in the genome as CAPS, AFLPs and RAPDs SNPs also require DNA sequence information. These codominant markers result from single base substitutions. They are highly abundant and exhibit a medium of polymorphism (Rafalski et al., the entirety of which is herein incorporated by reference). It is understood that a nucleic acid molecule of the present invention may be used as a marker.

[0073] A PCR primer is a nucleic acid molecule capable of initiating a polymerase activity while in a double-stranded structure to with another nucleic acid. Various methods for determining the structure of PCR primer and PCR techniques exist in the art. Computer generated searches using programs such as Primer3 (www-genome.wi.mit.edu/cgi-bin/primer/primer3.cgi), STSPipeline (www-genome.wi.mit.edu/cgi-bin/www-STS Pipeline), or GeneUp (Pesole et al., BioTechniques 25:112-123 (1998) the entirety of which is herein incorporated by reference), for example, can be used to identify potential PCR primers.

[0074] It is understood that a fragment of one or more of the nucleic acid molecules of the present invention may be a primer and specifically a PCR primer.

[0075] (b) Protein and Peptide Molecules

[0076] A class of agents comprises one or more of the protein or fragments thereof or peptide molecules encoded by SEQ ID NO: 1 through SEQ ID NO: 5,912 or one or more of the protein or fragment thereof and peptide molecules encoded by other nucleic acid agents of the present invention. As used herein, the term “protein molecule” or “peptide molecule” includes any molecule that comprises five or more amino acids. It is well known in the art that proteins may undergo modification, including post-translational modifications, such as, but not limited to, disulfide bond formation, glycosylation, phosphorylation, or oligomerization. Thus, as used herein, the term “protein molecule” or “peptide molecule” includes any protein molecule that is modified by any biological or non-biological process. The terms “amino acid” and “amino acids” refer to all naturally occurring L-amino acids. This definition is meant to include norleucine, ornithine, homocysteine, and homoserine.

[0077] Non-limiting examples of the protein or fragment molecules of the present invention are those protein or fragment thereof encoded by: SEQ ID NO: 1 through SEQ ID NO: 5,912 or fragment thereof.

[0078] One or more of the protein or fragment of peptide molecules may be produced via chemical synthesis, or more preferably, by expressing in a suitable bacterial or eukaryotic host. Suitable methods for expression are described by Sambrook et al., (In: Molecular Cloning, A Laboratory Manual, 2nd Edition, Cold Spring Harbor Press, Cold Spring Harbor, New York (1989)), or similar texts. For example, the protein may be expressed in, for example, bovine, bacterial, mammalian, microbial, insect, fungal and plant cells (See, for example, Uses of the Agents of the Invention, Section (a) Bovine Constructs, Bovine Transformed Cells and Genetically Improved Bovines (b) Non-Bovine Mammalian Constructs, Non-Bovine Transformed Mammalian Cells and Non-Bovine Trangenics; Section (c) Insect Constructs and Transformed Insect Cells; Section (d) Bacterial Constructs and Transformed Bacterial Cells; Section (e) Fungal Constructs and Transformed Fungal Cells; and Section (f) Plant Constructs, Transformed Plant Cells and Plant Transformants).

[0079] A “protein fragment” is a peptide or polypeptide molecule whose amino acid sequence comprises a subset of the amino acid sequence of that protein. A protein or fragment thereof that comprises one or more additional peptide regions not derived from that protein is a “fusion” protein. Such molecules may be derivatized to contain carbohydrate or other moieties (such as keyhole limpet hemocyanin, etc.). Fusion protein or peptide molecules of the present invention are preferably produced via recombinant means.

[0080] Another class of agents comprise protein or peptide molecules or fragments or fusions thereof encoded by SEQ ID NO: 1 through SEQ ID NO: 5,912 or complements thereof in which conservative, non-essential or non-relevant amino acid residues have been added, replaced or deleted. Computerized means for designing modifications in protein structure are known in the art (Dahiyat and Mayo, Science 278:82-87 (1997), the entirety of which is herein incorporated by reference).

[0081] The protein molecules of the present invention include bovine homologue proteins. An example of such a homologue is a homologue protein of a non-bovine species, that include but not limited to sheep, human, rat, goat, mouse, hamster, and pig.

[0082] Such a homologue can be obtained by any of a variety of methods. Most preferably, as indicated above, one or more of the disclosed sequences (SEQ ID NO: 1 through SEQ ID NO:5,912 or complements thereof) will be used to define a pair of primers that may be used to isolate the homologue-encoding nucleic acid molecules from any desired species. Such molecules can be expressed to yield homologues by recombinant means.

[0083] (c) Antibodies

[0084] One aspect of the present invention concerns antibodies, single-chain antigen binding molecules, or other proteins that specifically bind to one or more of the protein or peptide molecules of the present invention and their homologues, fusions or fragments. Such antibodies may be used to quantitatively or qualitatively detect the protein or peptide molecules of the present invention. As used herein, an antibody or peptide is said to “specifically bind” to a protein or peptide molecule of the present invention if such binding is not competitively inhibited by the presence of non-related molecules.

[0085] Nucleic acid molecules that encode all or part of the protein of the present invention can be expressed, via recombinant means, to yield protein or peptides that can in turn be used to elicit antibodies that are capable of binding the expressed protein or peptide. Such antibodies may be used in immunoassays for that protein. Such protein-encoding molecules, or their fragments may be a “fusion” molecule (i.e., a part of a larger nucleic acid molecule) such that, upon expression, a fusion protein is produced. It is understood that any of the nucleic acid molecules of the present invention may be expressed, via recombinant means, to yield proteins or peptides encoded by these nucleic acid molecules.

[0086] The antibodies that specifically bind proteins and protein fragments of the present invention may be polyclonal or monoclonal, and may comprise intact immunoglobulins, or antigen binding portions of immunoglobulins fragments (such as (F(ab′), F(ab′)₂), or single-chain immunoglobulins producible, for example, via recombinant means. It is understood that practitioners are familiar with the standard resource materials which describe specific conditions and procedures for the construction, manipulation and isolation of antibodies (see, for example, Harlow and Lane, In: Antibodies: A Laboratory Manual, Cold Spring Harbor Press, Cold Spring Harbor, N.Y. (1988), the entirety of which is herein incorporated by reference).

[0087] Murine monoclonal antibodies are particularly preferred. BALB/c mice are preferred for this purpose, however, equivalent strains may also be used. The animals are preferably immunized with approximately 25 μg of purified protein (or fragment thereof) that has been emulsified in a suitable adjuvant (such as TiterMax adjuvant (Vaxcel, Norcross, Ga.)). Immunization is preferably conducted at two intramuscular sites, one intraperitoneal site, and one subcutaneous site at the base of the tail. An additional i.v. injection of approximately 25 μg of antigen is preferably given in normal saline three weeks later. After approximately 11 days following the second injection, the mice may be bled and the blood screened for the presence of anti-protein or peptide antibodies. Preferably, a direct binding Enzyme-Linked Immunoassay (ELISA) is employed for this purpose.

[0088] More preferably, the mouse having the highest antibody titer is given a third i.v. injection of approximately 25 μg of the same protein or fragment. The splenic leukocytes from this animal may be recovered 3 days later, and then permitted to fuse, most preferably, using polyethylene glycol, with cells of a suitable myeloma cell line (such as, for example, the P3X63Ag8.653 myeloma cell line). Hybridoma cells are selected by culturing the cells under “HAT” (hypoxanthine-aminopterin-thymine) selection for about one week. The resulting clones may then be screened for their capacity to produce monoclonal antibodies (“mAbs”), preferably by direct ELISA.

[0089] In one embodiment, anti-protein or peptide monoclonal antibodies are isolated using a fusion of a protein or peptide of the present invention, or conjugate of a protein or peptide of the present invention, as immunogens. Thus, for example, a group of mice can be immunized using a fusion protein emulsified in Freund's complete adjuvant (e.g. approximately 50 μg of antigen per immunization). At three week intervals, an identical amount of antigen is emulsified in Freund's incomplete adjuvant and used to immunize the animals. Ten days following the third immunization, serum samples are taken and evaluated for the presence of antibody. If antibody titers are too low, a fourth booster can be employed. Polysera capable of binding the protein or peptide can also be obtained using this method.

[0090] In a preferred procedure for obtaining monoclonal antibodies, the spleens of the above-described immunized mice are removed, disrupted, and immune splenocytes are isolated over a ficoll gradient. The isolated splenocytes are fused, using polyethylene glycol with BALB/c-derived HGPRT (hypoxanthine guanine phosphoribosyl transferase) deficient P3x63xAg8.653 plasmacytoma cells. The fused cells are plated into 96 well microtiter plates and screened for hybridoma fusion cells by their capacity to grow in culture medium supplemented with hypothanthine, aminopterin and thymidine for approximately 2-3 weeks.

[0091] Hybridoma cells that arise from such incubation are preferably screened for their capacity to produce an immunoglobulin that binds to a protein of interest. An indirect ELISA may be used for this purpose. In brief, the supernatants of hybridomas are incubated in microtiter wells that contain immobilized protein. After washing, the titer of bound immunoglobulin can be determined using, for example, a goat anti-mouse antibody conjugated to horseradish peroxidase. After additional washing, the amount of immobilized enzyme is determined (for example through the use of a chromogenic substrate). Such screening is performed as quickly as possible after the identification of the hybridoma in order to ensure that a desired clone is not overgrown by non-secreting neighbor cells. Desirably, the fusion plates are screened several times since the rates of hybridoma growth vary. In a preferred sub-embodiment, a different antigenic form may be used to screen the hybridoma. Thus, for example, the splenocytes may be immunized with one immunogen, but the resulting hybridomas can be screened using a different immunogen. It is understood that any of the protein or peptide molecules of the present invention may be used to raise antibodies.

[0092] As discussed below, such antibody molecules or their fragments may be used for diagnostic purposes. Where the antibodies are intended for diagnostic purposes, it may be desirable to derivatize them, for example with a ligand group (such as biotin) or a detectable marker group (such as a fluorescent group, a radioisotope or an enzyme).

[0093] The ability to produce antibodies that bind the protein or peptide molecules of the present invention permits the identification of mimetic compounds of those molecules. A “mimetic compound” refers to a compound having similar functional and/or structural properties to another known compound or a particular fragment of that known compound. Mimetic compounds can be synthesized chemically. Combinatorial chemistry techniques, for example, can be used to produce libraries of peptides (see WO 9700267), polyketides (see WO 960968), peptide analogues (see WO 9635781, WO 9635122, and WO 9640732), oligonucleotides for use as mimetic compounds derived from this invention. Mimetic compounds and libraries can also be generated through recombinant DNA-derived techniques. For example, phage display libraries (see WO 9709436), DNA shuffling (see U.S. Pat. No. 5,811,238) other directed or random mutagenesis techniques can produce libraries of expressed mimetic compounds.

[0094] It is understood that any of the agents of the present invention can be substantially purified and/or be biologically active and/or recombinant.

[0095] Uses of the Agents of the Invention

[0096] Nucleic acid molecules and fragments thereof of the present invention may be employed to obtain other nucleic acid molecules from the same species (e.g., ESTs or fragment thereof from bovine may be utilized to obtain other nucleic acid molecules from bovine). Such nucleic acid molecules include the nucleic acid molecules that encode the complete coding sequence of a protein and promoters and flanking sequences of such molecules. In addition, such nucleic acid molecules include nucleic acid molecules that encode for other isozymes or gene family members. Such molecules can be readily obtained by using the above-described nucleic acid molecules or fragments thereof to screen cDNA or genomic libraries obtained from bovine. Methods for forming such libraries are well known in the art.

[0097] Nucleic acid molecules and fragments thereof of the present invention may also be employed to obtain nucleic acid homologues. Such homologues include the nucleic acid molecule of other organisms (particularly preferred other organisms are human, rat, goat, mouse, hamster and pig) including the nucleic acid molecules that encode, in whole or in part, protein homologues of other organisms, sequences of genetic elements such as promoters and transcriptional regulatory elements. Such molecules can be readily obtained by using the above-described nucleic acid molecules or fragments thereof to screen cDNA or genomic libraries obtained from such plant species. Methods for forming such libraries are well known in the art. Such homologue molecules may differ in their nucleotide sequences from those found in one or more of SEQ ID NO: 1 through SEQ ID NO: 5,912 or complements thereof because complete complementarity is not needed for stable hybridization. The nucleic acid molecules of the present invention therefore also include molecules that, although capable of specifically hybridizing with the nucleic acid molecules may lack “complete complementarity.”

[0098] Any of a variety of methods may be used to obtain one or more of the above-described nucleic acid molecules (Zamechik et al., Proc. Natl. Acad. Sci. (U.S.A.) 83:4143-4146 (1986), the entirety of which is herein incorporated by reference; Goodchild et al., Proc. Natl. Acad. Sci. (U.S.A.) 85:5507-5511 (1988), the entirety of which is herein incorporated by reference; Wickstrom et al., Proc. Natl. Acad. Sci. (U.S.A.) 85:1028-1032 (1988), the entirety of which is herein incorporated by reference; Holt et al., Molec. Cell Biol. 8:963-973 (1988), the entirety of which is herein incorporated by reference; Gerwirtz et al., Science 242:1303-1306 (1988), the entirety of which is herein incorporated by reference; Anfossi et al., Proc. Natl. Acad. Sci. (U.S.A.) 86:3379-3383 (1989), the entirety of which is herein incorporated by reference; Becker et al., EMBO J. 8:3685-3691 (1989); the entirety of which is herein incorporated by reference). Automated nucleic acid synthesizers may be employed for this purpose. In lieu of such synthesis, the disclosed nucleic acid molecules may be used to define a pair of primers that can be used with the polymerase chain reaction (Mullis et al., Cold Spring Harbor Symp. Quant. Biol. 51:263-273 (1986); Erlich et al., European Patent 50,424; European Patent 84,796; European Patent 258,017; European Patent 237,362; Mullis, European Patent 201,184; Mullis et al., U.S. Pat. No. 4,683,202; Erlich, U.S. Pat. No. 4,582,788; and Saiki et al., U.S. Pat. No. 4,683,194, all of which are herein incorporated by reference in their entirety) to amplify and obtain any desired nucleic acid molecule or fragment.

[0099] Promoter sequence(s) and other genetic elements, including but not limited to transcriptional regulatory flanking sequences, associated with one or more of the disclosed nucleic acid sequences can also be obtained using the disclosed nucleic acid sequence provided herein. In one embodiment, such sequences are obtained by incubating EST nucleic acid molecules or preferably fragments thereof with members of genomic libraries (e.g. bovine) and recovering clones that hybridize to the EST nucleic acid molecule or fragment thereof. In a second embodiment, methods of “chromosome walking,” or inverse PCR may be used to obtain such sequences (Frohman et al., Proc. Natl. Acad. Sci. (U.S.A.) 85:8998-9002 (1988); Ohara et al., Proc. Natl. Acad. Sci. (U.S.A.) 86:5673-5677 (1989); Pang et al., Biotechniques 22:1046-1048 (1977); Huang et al., Methods Mol. Biol. 69:89-96 (1997); Huang et al., Method Mol. Biol. 67:287-294 (1997); Benkel et al., Genet. Anal. 13:123-127 (1996); Hartl et al., Methods Mol. Biol. 58:293-301 (1996), all of which are herein incorporated by reference in their entirety).

[0100] The nucleic acid molecules of the present invention may be used to isolate promoters of cell enhanced, cell specific, tissue enhanced, tissue specific, developmentally or environmentally regulated expression profiles. Isolation and functional analysis of the 5′ flanking promoter sequences of these genes from genomic libraries, for example, using genomic screening methods and PCR techniques,would result in the isolation of useful promoters and transcriptional regulatory elements. These methods are known to those of skill in the art and have been described (See, for example, Birren et al., Genome Analysis: Analyzing DNA, 1, (1997), Cold Spring Harbor Laboratory Press, Cold Spring Harbor, N.Y., the entirety of which is herein incorporated by reference). Promoters obtained utilizing the nucleic acid molecules of the present invention could also be modified to affect their control characteristics. Examples of such modifications would include but are not limited to enhanced sequences as reported in Uses of the Agents of the Invention, Section (a) Bovine Constructs, Bovine Transformed Cells and Genetically Improved Bovines. Such genetic elements could be used to enhance gene expression of new and existing traits for cattle improvements.

[0101] In one sub-aspect, such an analysis is conducted by determining the presence and/or identity of polymorphism(s) by one or more of the nucleic acid molecules of the present invention and more preferably one or more of the EST nucleic acid molecule or fragment thereof which are associated with a phenotype, or a predisposition to that phenotype.

[0102] Any of a variety of molecules can be used to identify such polymorphism(s). In one embodiment, one or more of the EST nucleic acid molecules (or a sub-fragment thereof) may be employed as a marker nucleic acid molecule to identify such polymorphism(s). Alternatively, such polymorphisms can be detected through the use of a marker nucleic acid molecule or a marker protein that is genetically linked to (i.e., a polynucleotide that co-segregates with) such polymorphism(s).

[0103] In an alternative embodiment, such polymorphisms can be detected through the use of a marker nucleic acid molecule that is physically linked to such polymorphism(s). For this purpose, marker nucleic acid molecules comprising a nucleotide sequence of a polynucleotide located within lmb of the polymorphism(s), and more preferably within 100 kb of the polymorphism(s), and most preferably within 10 kb of the polymorphism(s) can be employed.

[0104] The genomes of animals and plants naturally undergo spontaneous mutation in the course of their continuing evolution (Gusella, Ann. Rev. Biochem. 55:831-854 (1986)). A “polymorphism” is a variation or difference in the sequence of the gene or its flanking regions that arises in some of the members of a species. The variant sequence and the “original” sequence co-exist in the species' population. In some instances, such co-existence is in stable or quasi-stable equilibrium.

[0105] A polymorphism is thus said to be “allelic,” in that, due to the existence of the polymorphism, some members of a species may have the original sequence (i.e., the original “allele”) whereas other members may have the variant sequence (i.e., the variant “allele”). In the simplest case, only one variant sequence may exist, and the polymorphism is thus said to be di-allelic. In other cases, the species' population may contain multiple alleles, and the polymorphism is termed tri-allelic, etc. A single gene may have multiple different unrelated polymorphisms. For example, it may have a di-allelic polymorphism at one site, and a multi-allelic polymorphism at another site.

[0106] The variation that defines the polymorphism may range from a single nucleotide variation to the insertion or deletion of extended regions within a gene. In some cases, the DNA sequence variations are in regions of the genome that are characterized by short tandem repeats (STRs) that include tandem di- or tri-nucleotide repeated motifs of nucleotides. Polymorphisms characterized by such tandem repeats are referred to as “variable number tandem repeat” (“VNTR”) polymorphisms. VNTRs have been used in identity analysis (Weber, U.S. Pat. No. 5,075,217; Armour et al., FEBS Lett. 307:113-115 (1992); Jones et al., Eur. J. Haematol. 39:144-147 (1987); Horn et al., PCT Patent Application WO91/14003; Jeffreys, European Patent Application 370,719; Jeffreys, U.S. Pat. No. 5,175,082; Jeffreys et al., Amer. J. Hum. Genet. 39:11-24 (1986); Jeffreys et al., Nature 316:76-79 (1985); Gray et al., Proc. R. Acad. Soc. Lond. 243:241-253 (1991); Moore et al., Genomics 10:654-660 (1991); Jeffreys et al., Anim. Genet. 18:1-15 (1987); Hillel et al., Anim. Genet. 20:145-155 (1989); Hillel et al., Genet. 124:783-789 (1990), all of which are herein incorporated by reference in their entirety).

[0107] The detection of polymorphic sites in a sample of DNA may be facilitated through the use of nucleic acid amplification methods. Such methods specifically increase the concentration of polynucleotides that span the polymorphic site, or include that site and sequences located either distal or proximal to it. Such amplified molecules can be readily detected by gel electrophoresis or other means.

[0108] The most preferred method of achieving such amplification employs the polymerase chain reaction (“PCR”) (Mullis et al., Cold Spring Harbor Symp. Quant. Biol. 51:263-273 (1986); Erlich et al., European Patent Appln. 50,424; European Patent Appln. 84,796; European Patent Application 258,017; European Patent Appln. 237,362; Mullis, European Patent Appln. 201,184; Mullis et al., U.S. Pat. No. 4,683,202; Erlich, U.S. Pat. No. 4,582,788; and Saiki et al., U.S. Pat. No. 4,683,194), using primer pairs that are capable of hybridizing to the proximal sequences that define a polymorphism in its double-stranded form.

[0109] In lieu of PCR, alternative methods, such as the “Ligase Chain Reaction” (“LCR”) may be used (Barany, Proc. Natl. Acad. Sci. (U.S.A.) 88:189-193 (1991), the entirety of which is herein incorporated by reference). LCR uses two pairs of oligonucleotide probes to exponentially amplify a specific target. The sequences of each pair of oligonucleotides is selected to permit the pair to hybridize to abutting sequences of the same strand of the target. Such hybridization forms a substrate for a template-dependent ligase. As with PCR, the resulting products thus serve as a template in subsequent cycles, and an exponential amplification of the desired sequence is obtained.

[0110] LCR can be performed with oligonucleotides having the proximal and distal sequences of the same strand of a polymorphic site. In one embodiment, either oligonucleotide will be designed to include the actual polymorphic site of the polymorphism. In such an embodiment, the reaction conditions are selected such that the oligonucleotides can be ligated together only if the target molecule either contains or lacks the specific nucleotide that is complementary to the polymorphic site present on the oligonucleotide. Alternatively, the oligonucleotides may be selected such that they do not include the polymorphic site (see, Segev, PCT Application WO 90/01069, the entirety of which is herein incorporated by reference).

[0111] The “Oligonucleotide Ligation Assay” (“OLA”) may alternatively be employed (Landegren et al., Science 241:1077-1080 (1988), the entirety of which is herein incorporated by reference). The OLA protocol uses two oligonucleotides which are designed to be capable of hybridizing to abutting sequences of a single strand of a target. OLA, like LCR, is particularly suited for the detection of point mutations. Unlike LCR, however, OLA results in “linear” rather than exponential amplification of the target sequence.

[0112] Nickerson et al., have described a nucleic acid detection assay that combines attributes of PCR and OLA (Nickerson et al., Proc. Natl. Acad. Sci. (U.S.A.) 87:8923-8927 (1990), the entirety of which is herein incorporated by reference). In this method, PCR is used to achieve the exponential amplification of target DNA, which is then detected using OLA. In addition to requiring multiple, and separate, processing steps, one problem associated with such combinations is that they inherit all of the problems associated with PCR and OLA.

[0113] Schemes based on ligation of two (or more) oligonucleotides in the presence of nucleic acid having the sequence of the resulting “di-oligonucleotide”, thereby amplifying the di-oligonucleotide, are also known (Wu et al., Genomics 4:560-569 (1989), the entirety of which is herein incorporated by reference), and may be readily adapted to the purposes of the present invention.

[0114] Other known nucleic acid amplification procedures, such as allele-specific oligomers, branched DNA technology, transcription-based amplification systems, or isothermal amplification methods may also be used to amplify and analyze such polymorphisms (Malek et al., U.S. Pat. No. 5,130,238; Davey et al., European Patent Application 329,822; Schuster et al., U.S. Pat. No. 5,169,766; Miller et aL, PCT Patent Application WO 89/06700; Kwoh et al., Proc. Natl. Acad. Sci. (U.S.A.) 86:1173-1177 (1989); Gingeras et al., PCT Patent Application WO 88/10315; Walker et al., Proc. Natl. Acad. Sci. (U.S.A.) 89:392-396 (1992), all of which are herein incorporated by reference in their entirety).

[0115] The identification of a polymorphism can be determined in a variety of ways. By correlating the presence or absence of it in a cow with the presence or absence of a phenotype, it is possible to predict the phenotype of that cow. If a polymorphism creates or destroys a restriction endonuclease cleavage site, or if it results in the loss or insertion of DNA (e.g., a VNTR polymorphism), it will alter the size or profile of the DNA fragments that are generated by digestion with that restriction endonuclease. As such, individuals that possess a variant sequence can be distinguished from those having the original sequence by restriction fragment analysis. Polymorphisms that can be identified in this manner are termed “restriction fragment length polymorphisms” (“RFLPs”). RFLPs have been widely used in human and plant genetic analyses (Glassberg, UK Patent Application 2135774; Skolnick et al., Cytogen. Cell Genet. 32:58-67 (1982); Botstein et al., Ann. J. Hum. Genet. 32:314-331 (1980); Fischer et al., (PCT Application WO90/13668); Uhlen, PCT Application WO90/11369).

[0116] Polymorphisms can also be identified by Single Strand Conformation Polymorphism (SSCP) analysis. SSCP is a method capable of identifying most sequence variations in a single strand of DNA, typically between 150 and 250 nucleotides in length (Elles, Methods in Molecular Medicine: Molecular Diagnosis of Genetic Diseases, Humana Press (1996), the entirety of which is herein incorporated by reference); Orita et al., Genomics 5:874-879 (1989), the entirety of which is herein incorporated by reference). Under denaturing conditions a single strand of DNA will adopt a conformation that is uniquely dependent on its sequence conformation. This conformation usually will be different, even if only a single base is changed. Most conformations have been reported to alter the physical configuration or size sufficiently to be detectable by electrophoresis. A number of protocols have been described for SSCP including, but not limited to, Lee et al., Anal. Biochem. 205:289-293 (1992), the entirety of which is herein incorporated by reference; Suzuki et al., Anal. Biochem. 192:82-84 (1991), the entirety of which is herein incorporated by reference; Lo et al., Nucleic Acids Research 20:1005-1009 (1992), the entirety of which is herein incorporated by reference; Sarkar et al., Genomics 13:441-443 (1992), the entirety of which is herein incorporated by reference. It is understood that one or more of the nucleic acids of the present invention, may be utilized as markers or probes to detect polymorphisms by SSCP analysis.

[0117] Polymorphisms may also be found using a DNA fingerprinting technique called amplified fragment length polymorphism (AFLP), which is based on the selective PCR amplification of restriction fragments from a total digest of genomic DNA to profile that DNA (Vos et al., Nucleic Acids Res. 23:4407-4414 (1995), the entirety of which is herein incorporated by reference). This method allows for the specific co-amplification of high numbers of restriction fragments, which can be visualized by PCR without knowledge of the nucleic acid sequence.

[0118] AFLP employs basically three steps. Initially, a sample of genomic DNA is cut with restriction enzymes and oligonucleotide adapters are ligated to the restriction fragments of the DNA. The restriction fragments are then amplified using PCR by using the adapter and restriction sequence as target sites for primer annealing. The selective amplification is achieved by the use of primers that extend into the restriction fragments, amplifying only those fragments in which the primer extensions match the nucleotide flanking the restriction sites. These amplified fragments are then visualized on a denaturing polyacrylamide gel.

[0119] AFLP analysis has been performed on Salix (Beismann et al., Mol. Ecol. 6:989-993 (1997), the entirety of which is herein incorporated by reference), Acinetobacter (Janssen et al., Int. J. Syst. Bacteriol. 47:1179-1187 (1997), the entirety of which is herein incorporated by reference), Aeromonas popoffi (Huys et al., Int. J. Syst. Bacteriol. 47:1165-1171 (1997), the entirety of which is herein incorporated by reference), rice (McCouch et al., Plant Mol. Biol. 35:89-99 (1997), the entirety of which is herein incorporated by reference; Nandi et al., Mol. Gen. Genet. 255:1-8 (1997), the entirety of which is herein incorporated by reference; Cho et al., Genome 39:373-378 (1996), the entirety of which is herein incorporated by reference), barley (Hordeum vulgare)(Simons et al., Genomics 44:61-70 (1997), the entirety of which is herein incorporated by reference; Waugh et al., Mol. Gen. Genet. 255:311-321 (1997), the entirety of which is herein incorporated by reference; Qi et al., Mol. Gen Genet. 254:330-336 (1997), the entirety of which is herein incorporated by reference; Becker et al., Mol. Gen. Genet. 249:65-73 (1995), the entirety of which is herein incorporated by reference), potato (Van der Voort et al., Mol. Gen. Genet. 255:438-447 (1997), the entirety of which is herein incorporated by reference; Meksem et al., Mol. Gen. Genet. 249:74-81 (1995), the entirety of which is herein incorporated by reference), Phytophthora infestans (Van der Lee et al., Fungal Genet. Biol. 21:278-291 (1997), the entirety of which is herein incorporated by reference), Bacillus anthracis (Keim et al., J. Bacteriol. 179:818-824 (1997), the entirety of which is herein incorporated by reference), Astragalus cremnophylax (Travis et al., Mol. Ecol. 5:735-745 (1996), the entirety of which is herein incorporated by reference), Arabidopsis (Cnops et al., Mol. Gen. Genet. 253:32-41 (1996), the entirety of which is herein incorporated by reference), Escherichia coli (Lin et al., Nucleic Acids Res. 24:3649-3650 (1996), the entirety of which is herein incorporated by reference), Aeromonas (Huys et al., Int. J. Syst. Bacteriol. 46:572-580 (1996), the entirety of which is herein incorporated by reference), nematode (Folkertsma et al., Mol. Plant Microbe Interact. 9:47-54 (1996), the entirety of which is herein incorporated by reference), tomato (Thomas et al., Plant J. 8:785-794 (1995), the entirety of which is herein incorporated by reference), cattle (Ajmone-Marsen et al., Anim. Genetics 28:418-426 (1997), the entirety of which is herein incorporated by reference and human (Latorra et al., PCR Methods Appl. 3:351-358 (1994), the entirety of which is herein incorporated by reference). AFLP analysis has also been used for fingerprinting mRNA (Money et al., Nucleic Acids Res. 24:2616-2617 (1996), the entirety of which is herein incorporated by reference; Bachem et al., Plant J. 9:745-753 (1996), the entirety of which is herein incorporated by reference). It is understood that one or more of the nucleic acids of the present invention may be utilized as markers or probes to detect polymorphisms by AFLP analysis or for fingerprinting RNA.

[0120] Polymorphisms may also be found using random amplified polymorphic DNA (RAPD) (Williams et al., Nucl. Acids Res. 18:6531-6535 (1990), the entirety of which is herein incorporated by reference) and cleaveable amplified polymorphic sequences (CAPS) (Lyamichev et al., Science 260:778-783 (1993), the entirety of which is herein incorporated by reference). It is understood that one or more of the nucleic acid molecules of the present invention, may be utilized as markers or probes to detect polymorphisms by RAPD or CAPS analysis.

[0121] Through genetic mapping, a fine scale linkage map can be developed using DNA markers, and, then, a genomic DNA library of large-sized fragments can be screened with molecular markers linked to the desired trait.

[0122] Current dairy breeding programs are often centered around selection of bulls for artificial insemination. Selection of sire and dam are important steps in any such program. It is understood that one or more nucleic acid or other molecule of the present invention may be used to assist in pedigree selection of the sire or dam for the production of replacement heifers. It is also understood that the nucleic acid molecules may be used to select appropriate embryos for implantation. Such embryos can be screened using one or nucleic acid molecules of the present invention. For example, a bovine embryo can be obtained in its blastula stage of development and cells from that embryo tested to determine the presence or absence of a trait (See, for example U.S. Pat. No. 5,578,449, the entirety of which is herein incorporated by reference).

[0123] One or more of the nucleic acid molecules of the present invention may be used as genetic markers. The genetic markers of the present invention may be mapped to a genetic location on a bovine genome. In an alternative embodiment, the genetic markers of the present invention may be mapped to a genetic location on a genome that exhibits synteny with the bovine genome (Eggen and Fries, Animal Genet. 26:215-236 (1995), the entirety of which is herein incorporated by reference). A preferred group of genomes that exhibit synteny with the bovine genome are the genomes of humans, sheep and pigs.

[0124] A cattle genetic map can be found at http://sol.marc.usda.gov/genome/cattle/htmls/chromosome list. A number of markers have been assigned to a cattle genetic map (See, for example, Ma et al., Mammalian Genome 9:545-549 (1988), the entirety of which is herein incorporated by reference; Fries et al., Animal Genet. 20:3-20 (1989), the entirety of which is herein incorporated by reference; Sonstegard et al., Anim. Genet. 29:341-347 (1998), the entirety of which is herein incorporated by reference; Barendse et al., Mammalian Genome 8:21-8 (1997), the entirety of which is herein incorporated by reference; Knappes et al., Genome Research 7:235-249 (1997), the entirety of which is herein incorporated by reference). Genomes that exhibit synteny with the bovine genome include human, mouse, rat, swine, sheep, and goat (Sonstegard et al., Anim. Genet. 29:341-347 (1998); Schmitz et al., Hereditas 128:257-263 (1998); Schlapfer et al., Anim. Genet. 29:265-272 (1998); Piumi et al., Cytogenet. Cell Genet. 81:36-41 (1998); Moisio et al., Anim. Genet. 29:55-57 (1998); Gu et al., Cytogenet. Cell Genet. 79:225-227 (1997); Oblap et al., Tsitol Genet. 31:68-74 (1997); Li et al., Genomics 49:76-82 (1998); Shaper et al., J. Biol. Chem. 272:31389-31399 (1997); Gao et al., J. Hered. 88:524-527 (1997); Sontegard et al., Mamm. Genome 8:751-755 (1997); Somincini et al., Mamm. Genome 8:486-490 (1997);Gao et al., Anim. Genet. 28:146-149 (1997); Yang et al., Mamm. Genome 8:262-266 (1997); Gao et al., Mamm. Genome 8:258-261 (1997); Sun et al., Genomics 39:47-54 (1997); Barendse et al., Mamm. Genome 8:21-28 (1997) Sun et al., Anim. Genet. 27:421-422 (1996); Pennacchio et al., Genome Res. 6:1103-1109 (1996); Le Provost et al., Mamm. Genome 7:657-666 (1996); Sun et al., Mamm. Genome 7:518-519 (1996); Lanneluc et al., Cytogenet. Cell. Genet. 72:212-214 (1996); Larsen et al., Cytogenet. Cell. Genet. 73:184-186 (1996); Mezzelani et al., Mamm. Genome. 6:629-635 (1995); Yang et al., Genomics 27:293-297 (1995); Park et al., Genomics 27:113-118 (1995); Vaiman et al., Cytogenet. Cell Genet. 70:112-115 (1995); Heriz et al., Mamm. Genome 6:56 (1995); Heriz et al., Mamm. Genome 5:742 (1994); Wallis et al., J. Hered. 85:490-492 (1994); Le Provost et al., Biochem. Biophys. Res. Commun. 203:1324-1332 (1994); Vaiman et al., Mamm. Genome 5:553-556 (1994); Beever et al., Mamm. Genome 5:542-545 (1994); Ferretti et al., Anim. Genet. 25:209-214 (1994); Buxton et al., Genomics 21:510-516 (1994); Lewin et al., Anim. Genet. 25 Suppl. 1:13-18 (1994); Eggen et al., Anim. Genet. 25:183-185 (1994), all of which are herein incorporated by reference in their entirety). Maps of genomes that exhibit synteny with the bovine genome are known in the art (See, for example http://www.marc.usda.gov/genome/swine/swine.html).

[0125] In addition to, for example, in situ hybridization (see below) the genetic position of a marker can be facilitated by the use of bovine somatic cell hybrid panels such as bovine-hamster somatic cells hybrids (See, for example, Yang et al., Genomics 48:93-99 (1998), the entirety of which is herein incorporated by reference; Womack, et al., Mamm. Genome 8:854-856 (1997), the entirety of which is herein incorporated by reference; Vaiman et al., Mamm. Genome 5:553-6 (1994), the entirety of which is herein incorporated by reference; Eggen et al., Anim. Genet. 25:31-35 (1994); Modi et al., Cytogenet. Cell Genet 81:213-216 (1998); Gu et al., Cytogenet Cell Genet 79:225-227 (1997), the entirety of which is herein incorporated by reference; Martin-Burriel et al., Cytogenet Cell Genet 79:179-183 (1997), the entirety of which is herein incorporated by reference; Yang et al., Genome Res. 8:731-736 (1998), the entirety of which is herein incorporated by reference; Gao et al., J. Heredity 88:524-527 (1997), the entirety of which is herein incorporated by reference; Konfortov et al., Anim. Genet. 29:302-306 (1998), the entirety of which is herein incorporated by reference).

[0126] The genetic linkage of marker molecules can be established by a gene mapping model such as, without limitation, the flanking marker model reported by Lander and Botstein, Genetics 121:185-199 (1989), and the interval mapping, based on maximum likelihood methods described by Lander and Botstein, Genetics 121:185-199 (1989), and implemented in the software package MAPMAKER/QTL (Lincoln and Lander, Mapping Genes Controlling Quantitative Traits Using MAPMAKER/QTL, Whitehead Institute for Biomedical Research, Massachusetts, (1990)). Additional models may be used and are known in the art.

[0127] A maximum likelihood estimate (MLE) for the presence of a marker is calculated, together with an MLE assuming no QTL effect, to avoid false positives. A log₁₀ of an odds ratio (LOD) is then calculated as: LOD=log₁₀ (MLE for the presence of a QTL/MLE given no linked QTL).

[0128] The LOD score essentially indicates how much more likely the data are to have arisen assuming the presence of a QTL than in its absence. The LOD threshold value for avoiding a false positive with a given confidence, say 95%, depends on the number of markers and the length of the genome. Graphs indicating LOD thresholds are set forth in Lander and Botstein, Genetics 121:185-199 (1989) the entirety of which is herein incorporated by reference.

[0129] The genetic location of Mendelian and complex traits (such as QTLs) have been reported in cattle utilizing a variety of models (Seplman and Bovenhuis, Anim. Genet. 29:77-84 (1998); Zang et al., Genetics 149:1959-1973 (1998); Mosig et al., Genetics 149:1557-15567 (1988); Coppieters et al., J. Hered. 89:193-195 (1998); Jansen et al., Genetics 148:391-399 (1988); Taylor et al., Anim. Genet. 29:194-201 (1998); Arranz et al., Anim. Genet. 29:107-115 (1998); Coppieters et al., Mamm. Genome 9:540-544 (1998); Lui et al., Genetics 148:495-505 (1998); Moody et al., J. Anim. Sci. 75:941-949 (1997); Simianer et al., Mamm. Genome 8:830-835 (1997); Spelman et., Genetics 144:1799-1808 (1996); Georges et al., Genetics 139:907-920 (1995); Mackinnon and Georges, Genetics 132:1177-85 (1992); Weller et al., J. Dairy Sci. 73:2525-2537(1990), all of which are herein incorporated by reference in their entirety). The genetic location and the association of one or more of the markers of the present invention may be established by using one of the models referenced herein or by other models known in the art.

[0130] It is understood that one or more of the nucleic acid molecules of the present invention may be used as molecular markers. It is also understood that one or more of the protein molecules of the present invention may be used as molecular markers.

[0131] In accordance with this aspect of the present invention, a sample nucleic acid is obtained from plants cells or tissues. Any source of nucleic acid may be used. Preferably, the nucleic acid is genomic DNA. The nucleic acid is subjected to restriction endonuclease digestion. For example, one or more nucleic acid molecule or fragment thereof of the present invention can be used as a probe in accordance with the above-described polymorphic methods. The polymorphism obtained in this approach can then be cloned to identify the mutation at the coding region which alters the protein's structure or regulatory region of the gene which affects its expression level.

[0132] In an aspect of the present invention, one or more of the nucleic molecules of the present invention are used to determine the level (i.e., the concentration of MRNA in a sample, etc.) in a mammal (preferably bovineor ovine, more preferably bovine) or pattern (i.e., the kinetics of expression, rate of decomposition, stability profile, etc.) of the expression of a protein encoded in part or whole by one or more of the nucleic acid molecule of the present invention (collectively, the “Expression Response” of a cell or tissue). As used herein, the Expression Response manifested by a cell or tissue is said to be “altered” if it differs from the Expression Response of cells or tissues of mammals not exhibiting the phenotype. To determine whether a Expression Response is altered, the Expression Response manifested by the cell or tissue of the mammal exhibiting the phenotype is compared with that of a similar cell or tissue sample of a mammal not exhibiting the phenotype. As will be appreciated, it is not necessary to re-determine the Expression Response of the cell or tissue sample of the mammal not exhibiting the phenotype each time such a comparison is made; rather, the Expression Response of a particular mammal may be compared with previously obtained values of normal mammals. As used herein, the phenotype of the organism is any of one or more characteristics of an organism (e.g. disease resistance, quality improvement or yield etc.). A change in genotype or phenotype may be transient or permanent. Also as used herein, a tissue sample is any sample that comprises more than one cell. In a preferred aspect, a tissue sample comprises cells that share a common characteristic (e.g. derived from muscle, liver, pituitary gland, brain, dry mammary gland, lactating mammary gland tissue etc.). As used herein, a particularly preferred mammal is bovine or ovine Further, as used herein a more particularly preferred mammal is bovine.

[0133] In one aspect of the present invention, an evaluation can be conducted to determine whether a particular MRNA molecule is present. One or more of the nucleic acid molecules of the present invention, preferably one or more of the EST nucleic acid molecules or fragments thereof of the present invention, are utilized to detect the presence or quantity of the mRNA species. Such molecules are then incubated with cell or tissue extracts of a mammal under conditions sufficient to permit nucleic acid hybridization. The detection of double-stranded probe-mRNA hybrid molecules is indicative of the presence of the mRNA; the amount of such hybrid formed is proportional to the amount of mRNA. Thus, such probes may be used to ascertain the level and extent of the mRNA production in a mammal's cell or tissue. Such nucleic acid hybridization may be conducted under quantitative conditions (thereby providing a numerical value of the amount of the MRNA present). Alternatively, the assay may be conducted as a qualitative assay that indicates either that the MRNA is present, or that its level exceeds a user set, predefined value.

[0134] A principle of in situ hybridization is that a labeled, single-stranded nucleic acid probe will hybridize to a complementary strand of cellular DNA or RNA and, under the appropriate conditions, these molecules will form a stable hybrid. When nucleic acid hybridization is combined with histological techniques, specific DNA or RNA sequences can be identified within a single cell. An advantage of in situ hybridization over more conventional techniques for the detection of nucleic acids is that it allows an investigator to determine the precise spatial population (Angerer et al., Dev. Biol. 101:477-484 (1984), the entirety of which is herein incorporated by reference; Angerer et al., Dev. Biol. 112:157-166 (1985), the entirety of which is herein incorporated by reference; Dixon et al., EMBO J. 10:1317-1324 (1991), the entirety of which is herein incorporated by reference). In situ hybridization may be used to measure the steady-state level of RNA accumulation. It is a sensitive technique and RNA sequences present in as few as 5-10 copies per cell can be detected (Hardin et al., J. Mol. Biol. 202:417-431 (1989), the entirety of which is herein incorporated by reference). A number of protocols have been devised for in situ hybridization, each with tissue preparation, hybridization, and washing conditions (Schimitz et al., Herditas 128:257-263 (1998), the entirety of which is herein incorporated by reference; Fries, Anim. Genet. 24:111-116 (1993), the entirety of which is herein incorporated by reference; Johnson et al., Cytogenet Cell Genet. 62:176-180 (1993), the entirety of which is herein incorporated by reference).

[0135] In situ hybridization also allows for the localization of proteins within a tissue or cell (Theis et al., Int. J. Dev. Biol. 37:101-110 (1993), the entirety of which is herein incorporated by reference; Graphodatsky et al., Mamm. Genome 4:183-184 (1993), the entirety of which is herein incorporated by reference). It is understood that one or more of the molecules of the present invention, preferably one or more of the EST nucleic acid molecules or fragments thereof of the present invention or one or more of the antibodies of the present invention, may be utilized to detect the level or pattern of a bovine enzyme pathway protein or mRNA thereof by in situ hybridization.

[0136] Fluorescent in situ hybridization allows the localization of a particular DNA sequence along a chromosome which is useful for gene mapping, following chromosomes in hybrid lines or detecting chromosomes with translocations, transversions or deletions. In situ hybridization has been used to identify chromosomes in several mammalian species (Popescu et al. Cytogenet. Cell Genet. 69:50-52 (1995), the entirety of which is herein incorporated by reference; Danielson et al., Genomics 15:146-160 (1993), herein incorporated by reference; Marino et al., Cytogenet. Cell Genet. 42:36-42 (1986), the entirety of which is herein incorporated by reference; Hayes et al., Cytogenet. Cell Genet. 64:281-285 (1993), the entirety of which is herein incorporated by reference; Solinas-Toldo et al., Cytogenet. Cell Genet. 69:1-6 (1995), the entirety of which is herein incorporated by reference; Hediger et al., Genomics 8:171-174 (1990), the entirety of which is herein incorporated by reference). It is understood that the nucleic acid molecules of the present invention may be used as probes or markers to localize sequences along a chromosome.

[0137] Another method to localize the expression of a molecule is tissue printing. Tissue printing provides a way to screen, at the same time on the same membrane, many tissue sections from different mammals or different developmental stages. Tissue-printing procedures utilize films designed to immobilize proteins and nucleic acids. In essence, a freshly cut section of a tissue is pressed gently onto nitrocellulose paper, nylon membrane or polyvinylidene difluoride membrane. Such membranes are commercially available (e.g. Millipore, Bedford, Mass. U.S.A.). The contents of the cut cell transfer onto the membrane and the contents and are immobilized to the membrane. The immobilized contents form a latent print that can be visualized with appropriate probes. When a mammalian tissue print is made on nitrocellulose paper, the tissue leaves a physical print that makes the anatomy visible without further treatment (Bhatia, Ann. N.Y. Acad. Sci. 745:187-209 (1994), the entirety of which is herein incorporated by reference).

[0138] Tissue printing on substrate films is described by Daoust, Exp. Cell Res. 12:203-211 (1957), the entirety of which is herein incorporated by reference, who detected amylase, protease, ribonuclease, and deoxyribonuclease in animal tissues using starch, gelatin, and agar films. These techniques can be applied to specific animal tissues (Drinkwater et al., Genomics 19:149-151 (1994); the entirety of which is herein incorporated by reference; Sandell et al., J. Orthop. Res. 12:1-14 (1994), the entirety of which is herein incorporated by reference). Advances in membrane technology have increased the range of applications of Daoust's tissue-printing techniques (Cassab and Varner, J. Cell. Biol. 105:2581-2588 (1987), the entirety of which is herein incorporated by reference) allowing the histochemical localization of various enzymes and deoxyribonuclease on nitrocellulose paper and nylon (Brant et al., Cell 49:57-63 (1987), the entirety of which is herein incorporated by reference; Knapp et al., J. Biol. Chem. 262:938-945 (1987), the entirety of which is herein incorporated by reference; Leube et al., Differentation 33:69-85 9 (1986), the entirety of which is herein incorporated by reference; Barendse et al., Nat. Genet. 6:227-235 (1994), the entirety of which is herein incorporated by reference; Varnett et al., J. Mol. Evol. 36:600-612 (1993); the entirety of which is herein incorporated by reference; Brett et al., Am. J. Pathol. 143:1699-1712(1993).

[0139] It is understood that one or more of the molecules of the present invention, preferably one or more of the EST nucleic acid molecules or fragments thereof of the present invention, or one or more of the antibodies of the present invention, may be utilized to detect the presence or quantity of a protein by tissue printing.

[0140] Further it is also understood that any of the nucleic acid molecules of the present invention may be used as marker nucleic acids andl or probes in connection with methods that require probes or marker nucleic acids. As used herein, a probe is an agent that is utilized to determine an attribute or feature (e.g. presence or absence, location, correlation, etc.) of a molecule, cell, tissue or mammal. As used herein, a marker nucleic acid is a nucleic acid molecule that is utilized to determine an attribute or feature (e.g., presence or absence, location, correlation, etc.) of a molecule, cell, tissue or mammal.

[0141] A microarray-based method for high-throughput monitoring of mammalian gene expression may be utilized to measure gene-specific hybridization targets. This ‘chip’-based approach involves using microarrays of nucleic acid molecules as gene-specific hybridization targets to quantitatively measure expression of the corresponding mammalian genes (Schena et al., Science 270:467-470 (1995), the entirety of which is herein incorporated by reference; Shalon, Ph.D. Thesis, Stanford University (1996), the entirety of which is herein incorporated by reference). Every nucleotide in a large sequence can be queried at the same time. Hybridization can be used to efficiently analyze nucleotide sequences.

[0142] Several microarray methods have been described. One method compares the sequences to be analyzed by hybridization to a set of oligonucleotides representing all possible subsequences (Bains and Smith, J. Theor. Biol. 135:303-307 (1989), the entirety of which is herein incorporated by reference). A second method hybridizes the sample to an array of oligonucleotide or cDNA molecules. An array consisting of oligonucleotides complementary to subsequences of a target sequence can be used to determine the identity of a target sequence, measure its amount, and detect differences between the target and a reference sequence. Nucleic acid molecule microarrays may also be screened with protein molecules or fragments thereof to determine nucleic acid molecules that specifically bind protein molecules or fragments thereof.

[0143] The microarray approach may be used with polypeptide targets (U.S. Pat. No. 5,445,934; U.S. Pat. No: 5,143,854; U.S. Pat. No. 5,079,600; U.S. Pat. No. 4,923,901, all of which are herein incorporated by reference in their entirety). Essentially, polypeptides are synthesized on a substrate (microarray) and these polypeptides can be screened with either protein molecules or fragments thereof or nucleic acid molecules in order to screen for either protein molecules or fragments thereof or nucleic acid molecules that specifically bind the target polypeptides. (Fodor et al., Science 251:767-773 (1991), the entirety of which is herein incorporated by reference). It is understood that one or more of the nucleic acid molecules or protein or fragments thereof of the present invention may be utilized in a microarray based method.

[0144] In a preferred embodiment of the present invention microarrays may be prepared that comprise nucleic acid molecules where preferably at least 10%, preferably at least 25%, more preferably at least 50% and even more preferably at least 75%, 80%, 85%, 90% or 95% of the nucleic acid molecules located on that array are selected from the group of nucleic acid molecules that specifically hybridize to one or more nucleic acid molecule having a nucleic acid sequence selected from the group of SEQ ID NO: 1 through SEQ ID NO: 5,912 or complement thereof or fragments of either.

[0145] In another preferred embodiment of the present invention microarrays may be prepared that comprise nucleic acid molecules where preferably at least 10%, preferably at least 25%, more preferably at least 50% and even more preferably at least 75%, 80%, 85%, 90% or 95% of the nucleic acid molecules located on that array are selected from the group of nucleic acid molecules having a nucleic acid sequence selected from the group of SEQ ID NO: 1 through SEQ ID NO: 5,912 or complements thereof.

[0146] Site-directed mutagenesis may be utilized to modify nucleic acid sequences, particularly as it is a technique that allows one or more of the amino acids encoded by a nucleic acid molecule to be altered (e.g. a threonine to be replaced by a methionine). Three basic methods for site-directed mutagenesis are often employed. These are cassette mutagenesis (Wells et al., Gene 34:315-323 (1985), the entirety of which is herein incorporated by reference), primer extension (Gilliam et al., Gene 12:129-137 (1980), the entirety of which is herein incorporated by reference; Zoller and Smith, Methods Enzymol. 100:468-500 (1983), the entirety of which is herein incorporated by reference; Dalbadie-McFarland et al., Proc. Natl. Acad. Sci. (U.S.A.) 79:6409-6413 (1982), the entirety of which is herein incorporated by reference) and methods based upon PCR (Scharf et al., Science 233:1076-1078 (1986), the entirety of which is herein incorporated by reference; Higuchi et al., Nucleic Acids Res. 16:7351-7367 (1988), the entirety of which is herein incorporated by reference). Site-directed mutagenesis approaches are also described in European Patent 0 385 962, the entirety of which is herein incorporated by reference; European Patent 0 359 472, the entirety of which is herein incorporated by reference; and PCT Patent Application WO 93/07278, the entirety of which is herein incorporated by reference.

[0147] Site-directed mutagenesis strategies have been applied both in vitro as well as in vivo (Lanz et al., J. Biol. Chem. 266:9971-9976 (1991), the entirety of which is herein incorporated by reference; Kovgan and Zhdanov, Biotekhnologiya 5:148-154, No. 207160n, Chemical Abstracts 110:225 (1989), the entirety of which is herein incorporated by reference; Ge et al., Proc. Natl. Acad. Sci. (U.S.A.) 86:4037-4041 (1989), the entirety of which is herein incorporated by reference; Zhu et al., J. Biol. Chem. 271:18494-18498 (1996), the entirety of which is herein incorporated by reference; Chu et al., Biochemistry 33:6150-6157 (1994), the entirety of which is herein incorporated by reference; Small et al., EMBO J. 11:1291-1296 (1992), the entirety of which is herein incorporated by reference; Cho et al., Mol. Biotechnol. 8:13-16 (1997), the entirety of which is herein incorporated by reference; Kita et al., J. Biol. Chem. 271:26529-26535 (1996), the entirety of which is herein incorporated by reference, Jin et al., Mol. Microbiol. 7:555-562 (1993), the entirety of which is herein incorporated by reference; Hatfield and Vierstra, J. Biol. Chem. 267:14799-14803 (1992), the entirety of which is herein incorporated by reference; Zhao et al., Biochemistry 31:5093-5099 (1992), the entirety of which is herein incorporated by reference).

[0148] Any of the nucleic acid molecules of the present invention may either be modified by site-directed mutagenesis or used as, for example, nucleic acid molecules that are used to target other nucleic acid molecules for modification. It is understood that mutants with more than one altered nucleotide can be constructed using techniques that practitioners are familiar with such as isolating restriction fragments and ligating such fragments into an expression vector (see, for example, Sambrook et al., Molecular Cloning: A Laboratory Manual, Cold Spring Harbor Press (1989)).

[0149] Sequence-specific DNA-binding proteins play a role in the regulation of transcription. The isolation of recombinant cDNAs encoding these proteins facilitates the biochemical analysis of their structural and functional properties. Genes encoding such DNA-binding proteins have been isolated using classical genetics (Vollbrecht et al., Nature 350:241-243 (1991), the entirety of which is herein incorporated by reference) and molecular biochemical approaches, including the screening of recombinant cDNA libraries with antibodies (Landschulz et al., Genes Dev. 2:786-800 (1988), the entirety of which is herein incorporated by reference) or DNA probes (Bodner et al., Cell 55:505-518 (1988), the entirety of which is herein incorporated by reference). In addition, an in situ screening procedure has been used and has facilitated the isolation of sequence-specific DNA-binding proteins (De Luca et al. J. Biol. Chem. 269:19193-19196 (1994), the entirety of which is herein incorporated by reference; Schreck et al., EMBO J. 8:3011-3017 (1989), the entirety of which is herein incorporated by reference). An in situ screening protocol does not require the purification of the protein of interest (Vinson et al., Genes Dev. 2:801-806 (1988), the entirety of which is herein incorporated by reference; Singh et al., Cell 52:415-423 (1988), the entirety of which is herein incorporated by reference).

[0150] Two steps may be employed to characterize DNA-protein interactions. The first is to identify promoter fragments that interact with DNA-binding proteins, to titrate binding activity, to determine the specificity of binding, and to determine whether a given DNA-binding activity can interact with related DNA sequences (Sambrook et al., Molecular Cloning: A Laboratory Manual, 2^{nd} edition, Cold Spring Harbor Laboratory Press, Cold Spring Harbor, N.Y. (1989)). The electrophoretic mobility-shift assay is widely used. The assay provides a rapid and sensitive method for detecting DNA-binding proteins based on the observation that the mobility of a DNA fragment through a nondenaturing, low-ionic strength polyacrylamide gel is retarded upon association with a DNA-binding protein (Fried and Crother, Nucleic Acids Res. 9:6505-6525 (1981), the entirety of which is herein incorporated by reference). When one or more specific binding activities have been identified, the exact sequence of the DNA bound by the protein may be determined. Several procedures for characterizing protein/DNA-binding sites are used, including methylation and ethylation interference assays (Maxam and Gilbert, Methods Enzymol. 65:499-560 (1980), the entirety of which is herein incorporated by reference; Wissman and Hillen, Methods Enzymol. 208:365-379 (1991), the entirety of which is herein incorporated by reference), footprinting techniques employing DNase I (Galas and Schmitz, Nucleic Acids Res. 5:3157-3170 (1978), the entirety of which is herein incorporated by reference), 1,10-phenanthroline-copper ion methods (Sigman et al., Methods Enzymol. 208:414-433 (1991), the entirety of which is herein incorporated by reference) and hydroxyl radicals methods (Dixon et al., Methods Enzymol. 208:414-433 (1991), the entirety of which is herein incorporated by reference). It is understood that one or more of the nucleic acid molecules of the present invention may be utilized to identify a protein or fragment thereof that specifically binds to a nucleic acid molecule of the present invention. It is also understood that one or more of the protein molecules or fragments thereof of the present invention may be utilized to identify a nucleic acid molecule that specifically binds to it.

[0151] A two-hybrid system is based on the fact that many cellular functions are carried out by proteins, such as transcription factors, that interact (physically) with one another. Two-hybrid systems have been used to probe the function of new proteins (Chien et al., Proc. Natl. Acad. Sci. (U.S.A.) 88:9578-9582 (1991) the entirety of which is herein incorporated by reference; Durfee et al., Genes Dev. 7:555-569 (1993) the entirety of which is herein incorporated by reference; Choi et al., Cell 78:499-512 (1994), the entirety of which is herein incorporated by reference; Kranz et al., Genes Dev. 8:313-327 (1994), the entirety of which is herein incorporated by reference).

[0152] Interaction mating techniques have facilitated a number of two-hybrid studies of protein-protein interaction. Interaction mating has been used to examine interactions between small sets of tens of proteins (Finley and Brent, Proc. Natl. Acad. Sci. (U.S.A.) 91:12098-12984 (1994), the entirety of which is herein incorporated by reference), larger sets of hundreds of proteins (Bendixen et al., Nucl. Acids Res. 22:1778-1779 (1994), the entirety of which is herein incorporated by reference) and to comprehensively map proteins encoded by a small genome (Bartel et al., Nature Genetics 12:72-77 (1996), the entirety of which is herein incorporated by reference). This technique utilizes proteins fused to the DNA-binding domain and proteins fused to the activation domain. They are expressed in two different haploid yeast strains of opposite mating type, and the strains are mated to determine if the two proteins interact. Mating occurs when haploid yeast strains come into contact and result in the fusion of the two haploids into a diploid yeast strain. An interaction can be determined by the activation of a two-hybrid reporter gene in the diploid strain. An advantage of this technique is that it reduces the number of yeast transformations needed to test individual interactions. It is understood that the protein-protein interactions of protein or fragments thereof of the present invention may be investigated using the two-hybrid system and that any of the nucleic acid molecules of the present invention that encode such proteins or fragments thereof may be used to transform yeast in the two-hybrid system.

[0153] (a) Bovine Constructs, Bovine Transformed Cells and Genetically Improved Bovines

[0154] The present invention also relates to methods for obtaining a genetically improved bovine host cell, comprising introducing into a bovine host cell exogenous genetic material. The present invention also relates to a bovine cell comprising a bovine recombinant vector. The present invention also relates to methods for obtaining a genetically improved bovine host cell, comprising introducing into a bovine cell exogenous genetic material. The present invention also provides genetically improved bovine and methods for producing same that comprise exogenous genetic material. Exogenous genetic material is any genetic material, whether naturally occurring or otherwise, from any source that is capable of being inserted into any organism. A preferred subset of exogenous genetic material is genetic material that comprises a nucleic acid molecule of the present invention.

[0155] Vectors suitable for replication in bovine cells include viral replicons, or sequences which insure integration of the appropriate sequences into the host genome. For example, another vector used to express foreign DNA is vaccinia virus. In this case, for example, a nucleic acid molecule encoding a protein or fragment thereof is inserted into the vaccinia genome. Techniques for the insertion of foreign DNA into the vaccinia virus genome are known in the art, and may utilize, for example, homologous recombination. Such heterologous DNA is generally inserted into a gene which is non-essential to the virus, for example, the thymidine kinase gene (tk), which also provides a selectable marker. Plasmid vectors that greatly facilitate the construction of recombinant viruses have been described (see, for example, Mackett et al, J Virol. 49:857 (1984); Chakrabarti et al., Mol. Cell. Biol. 5:3403 (1985); Moss, In: Gene Transfer Vectors For Mammalian Cells (Miller and Calos, eds., Cold Spring Harbor Laboratory, N.Y., p. 10, (1987); all of which are herein incorporated by reference in their entirety). Additional vectors that can be utilized in bovine systems are also described in (b) Non-Bovine Mammalian Constructs, Non-Bovine Transformed Mammalian Cells and Non-Bovine Trangenics. Expression of the protein then occurs in cells or animals which are infected with the live recombinant vaccinia virus.

[0156] The sequence to be integrated into the bovine sequence may be introduced into the primary host by any convenient means, which includes calcium precipitated DNA, spheroplast fusion, transformation, electroporation, biolistics, lipofection, microinjection, or other convenient means. Where an amplifiable gene is being employed, the amplifiable gene may serve as the selection marker for selecting hosts into which the amplifiable gene has been introduced. Alternatively, one may include with the amplifiable gene another marker, such as a drug resistance marker, e.g. neomycin resistance (G418 in mammalian cells), hygromycin in resistance etc.

[0157] Suitable bovine cell lines available as hosts for expression are known in the art and include many immortalized cell lines available from the American Type Culture Collection (ATCC), Manassas, Va., U.S.A.), such as MDBK cells, BT cells, bovine embryonic kidney cells and a number of other cell lines. Suitable promoters for bovine cells are also known in the art and include viral promoters such as that from Simian Virus 40 (SV40) (Fiers et al., Nature 273:113 (1978), the entirety of which is herein incorporated by reference), Rous sarcoma virus (RSV), adenovirus (ADV), and bovine papilloma virus (BPV). Bovine cells may also require terminator sequences and poly-A addition sequences. Enhancer sequences which increase expression may also be included, and sequences which promote amplification of the gene may also be desirable (for example, methotrexate resistance genes).

[0158] Animal cells are often better hosts for recombinant animal genetic material than unicellular. Further, the more similar the animal species from which the exogenous genetic material is derived and the host cell, the greater the likelihood that a functional protein will be expressed and processed. An animal cell is more likely to than a bacteria or yeast cell perform post-translational processing steps that may be necessary to yield a biologically active protein. In addition, an animal cell will more likely be able to correctly translate a foreign gene having interrupted coding sequences. Finally, genetic material introduced into an animal cell will frequently be incorporated into the genome of the host cell.

[0159] Animal cells are generally inadaptable for large scale batch preparations. The tissue cells of higher organisms tend to reproduce slower and often have reached a maturation stage where they do not replicate. Animal cell division is influenced by the environs of other cells. Cell proliferation changes the environment, unfavorably resulting in a decreased replication of the cell over time. Tissue cultures are very susceptible to infection and contamination which could destroy the investment of time and effort. Because of the proliferation deficiencies of normal animal tissue, it is preferable to use altered cells that proliferate freely, such as tumor cell lines.

[0160] Some of these obstacles are overcome by the generation of genetically improved animals. The introduction of transgenes into embryonal target cells and the expression of foreign genes in mammals is well known in the art (see, for example, Leder et al., U.S. Pat. No.4,736,866; Evans et al., U.S. Pat. No.4,870,009; Wagner et al., U.S. Pat. No.4,873,191; all of which are herein incorporated by reference in their entirety). Expression of exogenous genetic material allow the isolation of these proteins from tissues or fluids. If the expressed protein is a secretory protein or if the desired exogenous genetic material is linked to a secretion signal sequence to direct the secretion of the recombinate protein, then expressed protein can be harvested from the living animal from fluids such as blood or ascites fluid. If the recombinate protein is expressed in mammary secretion cells of bovines then the protein of interest can be isolated from milk. The genetically improved milk can be used as is, or it can be treated to further purify the recombinate protein.

[0161] A method of producing genetically improved bovine comprises first incorporating the exogenous genetic material into plasmid and transforming a bacterium such as E. coli. The exogenous genetic material is methylated, excised and introduced into a fertilized oocyte of the bovine to permit integration into the genome. The oocyte is cultured to form a pre-implantation embryo, thus replicating the genome of the fertilized embryo. At least one cell is removed from the pre-implantion embryo and treated to release the DNA contained therein. The released DNA is digested with a restriction endonuclease capable of cleaving the methylated transgene but not the unmethylated form. The resistance to digestion facilitates the identification of successful genetically improved bovines.

[0162] The pre-implantation embryo is divided into two hemi-embryos. One half of the embryo is analyzed for transgenesis and the other half is cloned to form a multiplicity of clonal genetically improved blastocysts, each having the same genotype. The genetically improved embryos are then transplanted into a recipient female to produce a genetically improved bovine. DeBoer et al. (U.S. Pat. Nos. 5,633,076 and 5,741,957, both of which are herein incorporated by reference in their entirety) and Rosen et al. (U.S. Pat. No. 5,565,362, the entirety of which is herein incorporated by reference) describe methods for the generation of genetically improved bovine and genetically improved embryos. These and other methods known in the art may be used to generate a genetically improved bovine comprising a nucleic acid molecule of the present invention. In a preferred embodiment, one or more of the proteins of the present invention may be overexpressed in a genetically improved bovine.

[0163] In general, if the desired secretory protein functions in a particular target cell or tissue, such as the expression of human serum albumin in the liver of a genetically improved bovine species, the expression is detectable in the bovine circulatory system. If however, the secretory protein is to be expressed in mammary secretion glands, then first a female offspring is identified by assaying for expression of the recombinate proteins in tissue or body fluids. To detect genetically improved milk, that female must be lactating at the time of screening.

[0164] When expression of the DNA of the transgene is necessary to generate a desired phenotype, the transgene typically includes at least a 5′ and preferable additional 5′ expression regulation sequences or promoters each operable linked to a recombinant or secretory-recombinant DNA. These promoters not only control transcription but also contribute to RNA stability and processing. These promoters are chosen to induce tissue-specific or cell type-specific expression of the recombinant DNA. Once the tissue or cell type is chosen then the promoter is chosen. Generally these promoters are derived from genes that are expressed primarily in the tissue or cell type chosen. It is preferred that the promoters chosen be expressed in only the tissue or cell line used. One example of a bovine promoter is the 16 kb 5′ sequence of the S1 casein gene which exhibits a tissue specificity for bovine mammary secretory cells (Deboer et al., U.S. Pat. Nos. 5,741,957 and 5,663,076). Other promoters, include but are not limited to, the 15 kb 5′ sequence of the albumin gene, the 15 kb 5′ sequence of the actin gene and the 15 kb upstream sequence of the protamine gene (Deboer et al., U.S. Pat. Nos. 5,741,957 and 5,663,076). In such processes exogenous genetic material is usually introduced into the germline of the animal at an early (usually one cell) developmental stage (Warner et al., Proc. Natl. Acad. Sci (U.S.A.) 78:5016 (1981); Miller et al., J. Endocrin. 120:481-488 (1989), both of which are herein incorporated by reference in their entirety.

[0165] The production of tissue-specific expression of exogenous DNA encoding various proteins in the mammary gland or the production of various proteins in the milk of genetically improved mice and sheep has been reported (see, for example, Simmons et al. Nature 328:530-532 (1987), the entirety of which is herein incorporated by reference). In addition a number of patents describe the production of genetically improved bovine expressing genes such that the polypeptide is detectable in milk produced by the genetically improved bovine (Deboer et al., U.S. Pat. No. 5,741,957; Deboer et al., U.S. Pat. No. 5,633,076; both of which are incorporated by reference in their entirety).

[0166] (b) Non-Bovine Mammalian Constructs, Non-Bovine Transformed Mammalian Cells, and Non-Bovine Trangenics

[0167] The present invention also relates to methods for obtaining a recombinant mammalian host cell, comprising introducing into a mammalian host cell exogenous genetic material. The present invention also relates to a mammalian cell comprising a mammalian recombinant vector. The present invention also relates to methods for obtaining a recombinant mammalian host cell, comprising introducing into a mammalian cell exogenous genetic material.

[0168] Mammalian cell lines available as hosts for expression are known in the art and include many immortalized cell lines available from the American Type Culture Collection (ATCC, Manassas, Va.), such as HeLa cells, Chinese hamster ovary (CHO) cells, baby hamster kidney (BHK) cells, and a number of other cell lines. Suitable promoters for mammalian cells are also known in the art and include viral promoters such as that from Simian Virus 40 (SV40) (Fiers et al., Nature 273:113 (1978), the entirety of which is herein incorporated by reference), Rous sarcoma virus (RSV), adenovirus (ADV), and bovine papilloma virus (BPV). Mammalian cells may also require terminator sequences and poly-A addition sequences. Enhancer sequences which increase expression may also be included, and sequences which promote amplification of the gene may also be desirable (for example, methotrexate resistance genes).

[0169] Vectors suitable for replication in mammalian cells may include viral replicons, or sequences which insure integration of the appropriate sequences encoding HCV epitopes into the host genome. For example, another vector used to express foreign DNA is vaccinia virus. In this case, for example, a nucleic acid molecule encoding a protein or fragment thereof is inserted into the vaccinia genome. Techniques for the insertion of foreign DNA into the vaccinia virus genome are known in the art, and may utilize, for example, homologous recombination. Such heterologous DNA is generally inserted into a gene which is non-essential to the virus, for example, the thymidine kinase gene (tk), which also provides a selectable marker. Plasmid vectors that greatly facilitate the construction of recombinant viruses have been described (see, for example, Mackett et al, J Virol. 49:857 (1984); Chakrabarti et al., Mol. Cell. Biol. 5:3403 (1985); Moss, In: Gene Transfer Vectors For Mammalian Cells (Miller and Calos, eds., Cold Spring Harbor Laboratory, N.Y., p. 10, (1987); all of which are herein incorporated by reference in their entirety). Expression of the HCV polypeptide then occurs in cells or animals which are infected with the live recombinant vaccinia virus.

[0170] The sequence to be integrated into the mammalian sequence may be introduced into the primary host by any convenient means, which includes calcium precipitated DNA, spheroplast fusion, transformation, electroporation, biolistics, lipofection, microinjection, or other convenient means. An amplifiable gene may be employed, and can serve as the selection marker for selecting hosts into which the amplifiable gene has been introduced. Alternatively, one may include with the amplifiable gene another marker, such as a drug resistance marker, e.g. neomycin resistance (G418 in mammalian cells), hygromycin in resistance etc., or an auxotrophy marker (HIS3, TRP1, LEU2, URA3, ADE2, LYS2, etc.) for use in yeast cells.

[0171] Depending upon the nature of the modification and associated targeting construct, various techniques may be employed for identifying targeted integration. Conveniently, the DNA may be digested with one or more restriction enzymes and the fragments probed with an appropriate DNA fragment which will identify the properly sized restriction fragment associated with integration.

[0172] One may use different promoter sequences, enhancer sequences, or other sequences which will allow for enhanced levels of expression in the expression host. Thus, one may combine an enhancer from one source, a promoter region from another source, a 5′- noncoding region upstream from the initiation methionine from the same or different source as the other sequences, and the like. One may provide for an intron in the non-coding region with appropriate splice sites or for an alternative 3′- untranslated sequence or polyadenylation site. Depending upon the particular purpose of the modification, any of these sequences may be introduced, as desired.

[0173] Where selection is intended, the sequence to be integrated will have with it a marker gene, which allows for selection. The marker gene may conveniently be downstream from the target gene and may include resistance to a cytotoxic agent, e.g. antibiotics, heavy metals, or the like, resistance or susceptibility to HAT, gancyclovir, etc., complementation to an auxotrophic host, particularly by using an auxotrophic yeast as the host for the subject manipulations, or the like. The marker gene may,also be on a separate DNA molecule, particularly with primary mammalian cells. Alternatively, one may screen the various transformants, due to the high efficiency of recombination in yeast, by using hybridization analysis, PCR, sequencing, or the like.

[0174] For homologous recombination, constructs can be prepared where the amplifiable gene will be flanked, normally on both sides with DNA homologous with the DNA of the target region. Depending upon the nature of the integrating DNA and the purpose of the integration, the homologous DNA will generally be within 100 kb, usually 50 kb, preferably about 25 kb, of the transcribed region of the target gene, more preferably within 2 kb of the target gene. Where modeling of the gene is intended, homology will usually be present proximal to the site of the mutation. The homologous DNA may include the 5′-upstream region outside of the transcriptional regulatory region or comprising any enhancer sequences, transcriptional initiation sequences, adjacent sequences, or the like. The homologous region may include a portion of the coding region, where the coding region may be comprised only of an open reading frame or combination of exons and introns. The homologous region may comprise all or a portion of an intron, where all or a portion of one or more exons may also be present. Alternatively, the homologous region may comprise the 3′-region, so as to comprise all or a portion of the transcriptional termination region, or the region 3′ of this region. The homologous regions may extend over all or a portion of the target gene or be outside the target gene comprising all or a portion of the transcriptional regulatory regions and/or the structural gene.

[0175] The integrating constructs may be prepared in accordance with conventional ways, where sequences may be synthesized, isolated from natural sources, manipulated, cloned, ligated, subjected to in vitro mutagenesis, primer repair, or the like. At various stages, the joined sequences may be cloned, and analyzed by restriction analysis, sequencing, or the like. Usually during the preparation of a construct where various fragments are joined, the fragments, intermediate constructs and constructs will be carried on a cloning vector comprising a replication system functional in a prokaryotic host, e.g., E. coli, and a marker for selection, e.g., biocide resistance, complementation to an auxotrophic host, etc. Other functional sequences may also be present, such as polylinkers, for ease of introduction and excision of the construct or portions thereof, or the like. A large number of cloning vectors are available such as pBR322, the pUC series, etc. These constructs may then be used for integration into the primary mammalian host.

[0176] In the case of the primary mammalian host, a replicating vector may be used. Usually, such vector will have a viral replication system, such as SV40, bovine papilloma virus, adenovirus, or the like. The linear DNA sequence vector may also have a selectable marker for identifying transfected cells. Selectable markers include the neo gene, allowing for selection with G418, the herpes tk gene for selection with HAT medium, the gpt gene with mycophenolic acid, complementation of an auxotrophic host, etc.

[0177] The vector may or may not be capable of stable maintenance in the host. Where the vector is capable of stable maintenance, the cells will be screened for homologous integration of the vector into the genome of the host, where various techniques for curing the cells may be employed. Where the vector is not capable of stable maintenance, for example, where a temperature sensitive replication system is employed, one may change the temperature from the permissive temperature to the non-permissive temperature, so that the cells may be cured of the vector. In this case, only those cells having integration of the construct comprising the amplifiable gene and, when present, the selectable marker, will be able to survive selection.

[0178] Where a selectable marker is present, one may select for the presence of the targeting construct by means of the selectable marker. Where the selectable marker is not present, one may select for the presence of the construct by the amplifiable gene. For the neo gene or the herpes tk gene, one could employ a medium for growth of the transformants of about 0.1-1 mg/ml of G418 or may use HAT medium, respectively. Where DHFR is the amplifiable gene, the selective medium may include from about 0.01-0.5 iM of methotrexate or be deficient in glycine-hypoxanthine-thymidine and have dialysed serum (GHT media).

[0179] The DNA can be introduced into the expression host by a variety of techniques that include calcium phosphate/DNA co-precipitates, microinjection of DNA into the nucleus, electroporation, yeast protoplast fusion with intact cells, transfection, polycations, e.g., polybrene, polyornithine, etc., or the like. The DNA may be single or double stranded DNA, linear or circular. The various techniques for transforming mammalian cells are well known (see Keown et al., Methods Enzymol. (1989); Keown et al., Methods Enzymol. 185:527-537 (1990); Mansour et al., Nature 336:348-352, (1988); all of which are herein incorporated by reference in their entirety).

[0180] (c) Insect Constructs and Transformed Insect Cells

[0181] The present invention also relates to an insect recombinant vectors comprising exogenous genetic material. The present invention also relates to an insect cell comprising an insect recombinant vector. The present invention also relates to methods for obtaining a recombinant insect host cell, comprising introducing into an insect cell exogenous genetic material. One or more of the nucleic acid molecules of the present invention may be permanently or transiently introduced into an insect cell.

[0182] The insect recombinant vector may be any vector which can be conveniently subjected to recombinant DNA procedures and can bring about the expression of the nucleic acid sequence. The choice of a vector will typically depend on the compatibility of the vector with the insect host cell into which the vector is to be introduced. The vector may be a linear or a closed circular plasmid. The vector system may be a single vector or plasmid or two or more vectors or plasmids which together contain the total DNA to be introduced into the genome of the insect host. In addition, the insect vector may be an expression vector. Nucleic acid molecules can be suitably inserted into a replication vector for expression in the insect cell under a suitable promoter for insect cells. Many vectors are available for this purpose, and selection of the appropriate vector will depend mainly on the size of the nucleic acid molecule to be inserted into the vector and the particular host cell to be transformed with the vector. Each vector contains various components depending on its function (amplification of DNA or expression of DNA) and the particular host cell with which it is compatible. The vector components for insect cell transformation generally include, but are not limited to, one or more of the following: a signal sequence, origin of replication, one or more marker genes, and an inducible promoter.

[0183] The insect vector may be an autonomously replicating vector, i.e., a vector which exists as an extrachromosomal entity, the replication of which is independent of chromosomal replication, e.g., a plasmid, an extrachromosomal element, a minichromosome, or an artificial chromosome. The vector may contain any means for assuring self-replication. Alternatively, the vector may be one which, when introduced into the insect cell, is integrated into the genome and replicated together with the chromosome(s) into which it has been integrated. For integration, the vector may rely on the nucleic acid sequence of the vector for stable integration of the vector into the genome by homologous or nonhomologous recombination. Alternatively, the vector may contain additional nucleic acid sequences for directing integration by homologous recombination into the genome of the insect host. The additional nucleic acid sequences enable the vector to be integrated into the host cell genome at a precise location(s) in the chromosome(s). To increase the likelihood of integration at a precise location, there should be preferably two nucleic acid sequences which individually contain a sufficient number of nucleic acids, preferably 400 bp to 1500 bp, more preferably 800 bp to 1000 bp, which are highly homologous with the corresponding target sequence to enhance the probability of homologous recombination. These nucleic acid sequences may be any sequence that is homologous with a target sequence in the genome of the insect host cell, and, furthermore, may be non-encoding or encoding sequences.

[0184] Baculovirus expression vectors (BEVs) have become important tools for the expression of foreign genes, both for basic research and for the production of proteins with direct clinical applications in human and veterinary medicine (Doerfler, Curr. Top. Microbiol. Immunol. 131:51-68 (1968); Luckow and Summers, Bio/Technology 6:47-55 (1988a); Miller, Annual Review of Microbiol. 42:177-199 (1988); Summers, Curr. Comm. Molecular Biology, Cold Spring Harbor Press, Cold Spring Harbor, N.Y. (1988); all of which are herein incorporated by reference in their entirety). BEVs are recombinant insect viruses in which the coding sequence for a chosen foreign gene has been inserted behind a baculovirus promoter in place of the viral gene, e.g., polyhedrin (Smith and Summers, U.S. Pat. No., 4,745,051, the entirety of which is incorporated herein by reference).

[0185] The use of baculovirus vectors relies upon the host cells being derived from Lepidopteran insects such as Spodopterafrugiperda or Trichoplusia ni. The preferred Spodopterafrugiperda cell line is the cell line Sf9. The Spodopterafrugiperda Sf9 cell line was obtained from American Type Culture Collection (Manassas, Va.) and is assigned accession number ATCC CRL 1711 (Summers and Smith, A Manual of Methods for Baculovirus Vectors and Insect Cell Culture Procedures, Texas Ag. Exper. Station Bulletin No. 1555 (1988), the entirety of which is herein incorporated by reference). Other insect cell systems, such as the silkworm B. mori may also be used.

[0186] The proteins expressed by the BEVs are, therefore, synthesized, modified and transported in host cells derived from Lepidopteran insects. Most of the genes that have been inserted and produced in the baculovirus expression vector system have been derived from vertebrate species. Other baculovirus genes in addition to the polyhedrin promoter may be employed to advantage in a baculovirus expression system. These include immediate-early (alpha), delayed-early (beta), late (gamma), or very late (delta), according to the phase of the viral infection during which they are expressed. The expression of these genes occurs sequentially, probably as the result of a “cascade” mechanism of transcriptional regulation. (Guarino and Summers, J. Virol. 57:563-571 (1986); Guarino and Summers, J. Virol. 61:2091-2099 (1987); Guarino and Summers, Virol. 162:444-451 (1988); all of which are herein incorporated by reference in their entirety).

[0187] Alternatively, recombinant baculoviruses can be created using a baculovirus shuttle vector system (Luckow et al., J. Virol. 67:4566-4579 (1993), incorporated by reference in its entirety), now marketed as the Bac-To-Bac™ Expression System (Life Technologies, Inc. Rockville, Md.). Pure recombinant baculoviruses carrying the recombinant gene are used to infect cells cultured, for example, in Excell 401 serum-free medium (JRH Biosciences, Lenexa, Kans.) or Sf900-II (Life Technologies, Inc.). The recombinant proteins secreted into the medium, for example, can be recovered by standard biochemical approaches. Supernatants from mammalian or insect cells expressing the recombinant proteins can be first concentrated using any of a number of commercial concentration units.

[0188] Insect recombinant vectors are useful as intermediates for the infection or transformation of insect cell systems. For example, an insect recombinant vector containing a nucleic acid molecule encoding a baculovirus transcriptional promoter followed downstream by an insect signal DNA sequence is capable of directing the secretion of the desired biologically active protein from the insect cell. The vector may utilize a baculovirus transcriptional promoter region derived from any of the over 500 baculoviruses generally infecting insects, such as for example the Orders Lepidoptera, Diptera, Orthoptera, Coleoptera and Hymenoptera, including for example but not limited to the viral DNAs of Autographa californica MNPV, Bombyx Mori NPV, Trichoplusia ni MNPV, Rachiplusia ou MNPV or Galleria mellonella MNPV, wherein said baculovirus transcriptional promoter is a baculovirus immediate-early gene IEl or IEN promoter; an immediate-early gene in combination with a baculovirus delayed-early gene promoter region selected from the group consisting of 39 K and a HindIII-k fragment delayed-early gene; or a baculovirus late gene promoter. The immediate-early or delayed-early promoters can be enhanced with transcriptional enhancer elements. The insect signal DNA sequence may code for a signal peptide of a Lepidopteran adipokinetic hormone precursor or a signal peptide of the Manduca sexta adipokinetic hormone precursor (Summers, U.S. Pat. No. 5,155,037; the entirety of which is herein incorporated by reference). Other insect signal DNA sequences include a signal peptide of the Orthoptera Schistocerca gregaria locust adipokinetic hormone precurser and the Drosophila melanogaster cuticle genes CP1, CP2, CP3 or CP4 or for an insect signal peptide having substantially a similar chemical composition and function (Summers, U.S. Pat. No. 5,155,037).

[0189] Insect cells are distinctly different from animal cells. Insects have a unique life cycle and have distinct cellular properties such as the lack of intracellular plasminogen activators in which are present in vertebrate cells. Another difference is the high expression levels of protein products ranging from 1 to greater than 500 mg/liter and the ease at which cDNA can be cloned into cells (Frasier, In Vitro Cell Dev. Biol. 25:225 (1989); Summers and Smith, In: A Manual of Methods for Baculovirus Vectors and Insect Cell Culture Procedures, Texas Ag. Exper. Station Bulletin No. 1555 (1988), both of which are incorporated by reference in their entirety).

[0190] Recombinant protein expression in insect cells is achieved by viral infection or stable transformation. For viral infection, the desired gene is cloned into baculovirus at the site of the wild-type polyhedrin gene (Webb and Summers, Technique 2:173 (1990); Bishop and Posse, Adv. Gene Technol. 1:55 (1990); both of which are incorporated by reference in their entirety). The polyhedrin gene is a component of a protein coat in occlusions which encapsulate virus particles. Deletion or insertion in the polyhedron gene results the failure to form occlusion bodies. Occlusion negative viruses are morphologically different from occlusion positive viruses and enable one skilled in the art to identify and purify recombinant viruses.

[0191] The vectors of present invention preferably contain one or more selectable markers which permit easy selection of transformed cells. A selectable marker is a gene the product of which provides, for example biocide or viral resistance, resistance to heavy metals, prototrophy to auxotrophs, and the like. Selection may be accomplished by co-transformation, e.g., as described in WO 91/17243, a nucleic acid sequence of the present invention may be operably linked to a suitable promoter sequence. The promoter sequence is a nucleic acid sequence which is recognized by the insect host cell for expression of the nucleic acid sequence. The promoter sequence contains transcription and translation control sequences which mediate the expression of the protein or fragment thereof. The promoter may be any nucleic acid sequence which shows transcriptional activity in the insect host cell of choice and may be obtained from genes encoding polypeptides either homologous or heterologous to the host cell.

[0192] For example, a nucleic acid molecule encoding a protein or fragment thereof may also be operably linked to a suitable leader sequence. A leader sequence is a nontranslated region of a mRNA which is important for translation by the fungal host. The leader sequence is operably linked to the 5′ terminus of the nucleic acid sequence encoding the protein or fragment thereof. The leader sequence may be native to the nucleic acid sequence encoding the protein or fragment thereof or may be obtained from foreign sources. Any leader sequence which is functional in the insect host cell of choice may be used in the present invention.

[0193] A polyadenylation sequence may also be operably linked to the 3′ terminus of the nucleic acid sequence of the present invention. The polyadenylation sequence is a sequence which when transcribed is recognized by the insect host to add polyadenosine residues to transcribed MRNA. The polyadenylation sequence may be native to the nucleic acid sequence encoding the protein or fragment thereof or may be obtained from foreign sources. Any polyadenylation sequence which is functional in the fungal host of choice may be used in the present invention.

[0194] To avoid the necessity of disrupting the cell to obtain the protein or fragment thereof, and to minimize the amount of possible degradation of the expressed polypeptide within the cell, it is preferred that expression of the polypeptide gene gives rise to a product secreted outside the cell. To this end, the protein or fragment thereof of the present invention may be linked to a signal peptide linked to the amino terminus of the protein or fragment thereof. A signal peptide is an amino acid sequence which permits the secretion of the protein or fragment thereof from the insect host into the culture medium. The signal peptide may be native to the protein or fragment thereof of the invention or may be obtained from foreign sources. The 5′ end of the coding sequence of the nucleic acid sequence of the present invention may inherently contain a signal peptide coding region naturally linked in translation reading frame with the segment of the coding region which encodes the secreted protein or fragment thereof.

[0195] At present, a mode of achieving secretion of a foreign gene product in insect cells is by way of the foreign gene's native signal peptide. Because the foreign genes are usually from non-insect organisms, their signal sequences may be poorly recognized by insect cells, and hence, levels of expression may be suboptimal. However, the efficiency of expression of foreign gene products seems to depend primarily on the characteristics of the foreign protein. On average, nuclear localized or non-structural proteins are most highly expressed, secreted proteins are intermediate, and integral membrane proteins are the least expressed. One factor generally affecting the efficiency of the production of foreign gene products in a heterologous host system is the presence of native signal sequences (also termed presequences, targeting signals, or leader sequences) associated with the foreign gene. The signal sequence is generally coded by a DNA sequence immediately following (5′ to 3′) the translation start site of the desired foreign gene.

[0196] The expression dependence on the type of signal sequence associated with a gene product can be represented by the following example: If a foreign gene is inserted at a site downstream from the translational start site of the baculovirus polyhedrin gene so as to produce a fusion protein (containing the N-terminus of the polyhedrin structural gene), the fused gene is highly expressed. But less expression is achieved when a foreign gene is inserted in a baculovirus expression vector immediately following the transcriptional start site and totally replacing the polyhedrin structural gene.

[0197] Insertions into the region −50 to −1 significantly alter (reduce) steady state transcription which, in turn, reduces translation of the foreign gene product. Use of the pVL941 vector optimizes transcription of foreign genes to the level of the polyhedrin gene transcription. Even though the transcription of a foreign gene may be optimal, optimal translation may vary because of several factors involving processing: signal peptide recognition, mRNA and ribosome binding, glycosylation, disulfide bond formation, sugar processing, oligomerization, for example.

[0198] The properties of the insect signal peptide are expected to be more optimal for the efficiency of the translation process in insect cells than those from vertebrate proteins. This phenomenon can generally be explained by the fact that proteins secreted from cells are synthesized as precursor molecules containing hydrophobic N-terminal signal peptides. The signal peptides direct transport of the select protein to its target membrane and are then cleaved by a peptidase on the membrane, such as the endoplasmic reticulum, when the protein passes through it.

[0199] Another exemplary insect signal sequence is the sequence encoding for Drosophila cuticle proteins such as CP1, CP2, CP3 or CP4 (Summers, U.S. Pat. No.5,278,050; the entirety of which is herein incorporated by reference). Most of a 9 kb region of the Drosophila genome containing genes for the cuticle proteins has been sequenced. Four of the five cuticle genes contains a signal peptide coding sequence interrupted by a short intervening sequence (about 60 base pairs) at a conserved site. Conserved sequences occur in the 5 mRNA untranslated region, in the adjacent 35 base pairs of upstream flanking sequence and at −200 base pairs from the mRNA start position in each of the cuticle genes.

[0200] Standard methods of insect cell culture, cotransfection and preparation of plasmids have been described (Summers and Smith, A Manual of Methods for Baculovirus Vectors and Insect Cell Culture Procedures, Texas Agricultural Experiment Station Bulletin No. 1555, Texas A&M University (1987), O'Reilly et al, Bacuovirus Expression Vectors: A Laboratory Manual, W. H. Freeman and Company, New York (1992), King and Possee, The Baculocirus Expression System: A Laboratory Guide, Chapman & Hall, London (1992)). Procedures for the cultivation of viruses and cells are described in Volkman and Summers, J. Virol 19:820-832 (1975) and Volkman et al., J. Virol 19:820-832 (1976); both of which are herein incorporated by reference in their entirety.

[0201] (d) Bacterial Constructs and Transformed Bacterial Cells

[0202] The present invention also relates to a bacterial recombinant vector comprising exogenous genetic material. The present invention also relates to a bacteria cell comprising a bacterial recombinant vector. The present invention also relates to methods for obtaining a recombinant bacteria host cell, comprising introducing into a bacterial host cell exogenous genetic material. One or more of the nucleic acid molecules of the present invention may be permanently or transiently introduced into a bacterial cell.

[0203] The bacterial recombinant vector may be any vector which can be conveniently subjected to recombinant DNA procedures. The choice of a vector will typically depend on the compatibility of the vector with the bacterial host cell into which the vector is to be introduced. The vector may be a linear or a closed circular plasmid. The vector system may be a single vector or plasmid or two or more vectors or plasmids which together contain the total DNA to be introduced into the genome of the bacterial host. In addition, the bacterial vector may be an expression vector. Nucleic acid molecules encoding protein homologues or fragments thereof can, for example, be suitably inserted into a replicable vector for expression in the bacterium under the control of a suitable promoter for bacteria. Many vectors are available for this purpose, and selection of the appropriate vector will depend mainly on the size of the nucleic acid to be inserted into the vector and the particular host cell to be transformed with the vector. Each vector contains various components depending on its function (amplification of DNA or expression of DNA) and the particular host cell with which it is compatible. The vector components for bacterial transformation generally include, but are not limited to, one or more of the following: a signal sequence, an origin of replication, one or more marker genes, and an inducible promoter.

[0204] In general, plasmid vectors containing replicon and control sequences that are derived from species compatible with the host cell are used in connection with bacterial hosts. The vector ordinarily carries a replication site, as well as marking sequences that are capable of providing phenotypic selection in transformed cells. For example, E. coli is typically transformed using pBR322, a plasmid derived from an E. coli species (see, e.g., Bolivar et al., Gene 2:95 (1977); the entirety of which is herein incorporated by reference). pBR322 contains genes for ampicillin and tetracycline resistance and thus provides easy means for identifying transformed cells. The pBR322 plasmid, or other microbial plasmid or phage, also generally contains, or is modified to contain, promoters that can be used by the microbial organism for expression of the selectable marker genes.

[0205] Nucleic acid molecules encoding protein or fragments thereof may be expressed not only directly, but also as a fusion with another polypeptide, preferably a signal sequence or other polypeptide having a specific cleavage site at the N-terminus of the mature polypeptide. In general, the signal sequence may be a component of the vector, or it may be a part of the polypeptide DNA that is inserted into the vector. The heterologous signal sequence selected should be one that is recognized and processed (i.e., cleaved by a signal peptidase) by the host cell. For bacterial host cells that do not recognize and process the native polypeptide signal sequence, the signal sequence is substituted by a bacterial signal sequence selected, for example, from the group consisting of the alkaline phosphatase, penicillinase, lpp, or heat-stable enterotoxin II leaders.

[0206] Both expression and cloning vectors contain a nucleic acid sequence that enables the vector to replicate in one or more selected host cells. Generally, in cloning vectors this sequence is one that enables the vector to replicate independently of the host chromosomal DNA, and includes origins of replication or autonomously replicating sequences. Such sequences are well known for a variety of bacteria. The origin of replication from the plasmid pBR322 is suitable for most Gram-negative bacteria.

[0207] Expression and cloning vectors also generally contain a selection gene, also termed a selectable marker. This gene encodes a protein necessary for the survival or growth of transformed host cells grown in a selective culture medium. Host cells not transformed with the vector containing the selection gene will not survive in the culture medium. Typical selection genes encode proteins that (a) confer resistance to antibiotics or other toxins, e.g., ampicillin, neomycin, methotrexate, or tetracycline, (b) complement auxotrophic deficiencies, or (c) supply critical nutrients not available from complex media, e.g., the gene encoding D-alanine racemase for Bacilli. One example of a selection scheme utilizes a drug to arrest growth of a host cell. Those cells that are successfully transformed with a heterologous protein homologue or fragment thereof produce a protein conferring drug resistance and thus survive the selection regimen.

[0208] The expression vector for producing a protein or fragment thereof can also contains an inducible promoter that is recognized by the host bacterial organism and is operably linked to the nucleic acid encoding, for example, the nucleic acid molecule encoding the protein homologue or fragment thereof of interest. Inducible promoters suitable for use with bacterial hosts include the beta-lactamase and lactose promoter systems (Chang et al., Nature 275:615 (1978); Goeddel et al., Nature 281:544 (1979); both of which are herein incorporated by reference in their entirety), the arabinose promoter system (Guzman et al., J. Bacteriol. 174:7716-7728 (1992); the entirety of which is herein incorporated by reference), alkaline phosphatase, a tryptophan (trp) promoter system (Goeddel, Nucleic Acids Res. 8:4057 (1980); EP 36,776; both of which are herein incorporated by reference in their entirety) and hybrid promoters such as the tac promoter (deBoer et al., Proc. Natl. Acad. Sci. (USA) 80:21-25 (1983); the entirety of which is herein incorporated by reference). However, other known bacterial inducible promoters are suitable (Siebenlist et al., Cell 20:269 (1980); the entirety of which is herein incorporated by reference).

[0209] Promoters for use in bacterial systems also generally contain a Shine-Dalgarno (S. D.) sequence operably linked to the DNA encoding the polypeptide of interest. The promoter can be removed from the bacterial source DNA by restriction enzyme digestion and inserted into the vector containing the desired DNA.

[0210] Construction of suitable vectors containing one or more of the above-listed components employs standard ligation techniques. Isolated plasrnids or DNA fragments are cleaved, tailored, and religated in the form desired to generate the plasmids required. Examples of available bacterial expression vectors include, but are not limited to, the multifunctional E. coli cloning and expression vectors such as Bluescript™ (Stratagene, La Jolla, Calif.), in which, for example, encoding an A. nidulans protein homologue or fragment thereof homologue, may be ligated into the vector in frame with sequences for the amino-terminal Met and the subsequent 7 residues of beta-galactosidase so that a hybrid protein is produced; pIN vectors (Van Heeke and Schuster, J. Biol. Chem. 264:5503-5509 (1989), the entirety of which is herein incorporated by reference); and the like. pGEX vectors (Promega, Madison Wis. U.S.A.) may also be used to express foreign polypeptides as fusion proteins with glutathione S-transferase (GST). In general, such fusion proteins are soluble and can easily be purified from lysed cells by adsorption to glutathione-agarose beads followed by elution in the presence of free glutathione. Proteins made in such systems are designed to include heparin, thrombin or factor XA protease cleavage sites so that the cloned polypeptide of interest can be released from the GST moiety at will.

[0211] Suitable host bacteria for a bacterial vector include archaebacteria and eubacteria, especially eubacteria, and most preferably Enterobacteriaceae. Examples of useful bacteria include Escherichia, Enterobacter, Azotobacter, Erwinia, Bacillus, Pseudomonas, Klebsiella, Proteus, Salmonella, Serratia, Shigella, Rhizobia, Vitreoscilla, and Paracoccus. Suitable E. coli hosts include E. coli W31 10 (American Type Culture Collection (ATCC) 27,325, Manassas, Va. U.S.A.), E. coli 294 (ATCC 31,446), E. coli B, and E. coli X1776 (ATCC 31,537). These examples are illustrative rather than limiting. Mutant cells of any of the above-mentioned bacteria may also be employed. It is, of course, necessary to select the appropriate bacteria taking into consideration replicability of the replicon in the cells of a bacterium. For example, E. coli, Serratia, or Salmonella species can be suitably used as the host when well known plasmids such as pBR322, pBR325, pACYC177, or pKN410 are used to supply the replicon. E. coli strain W3110 is a preferred host or parent host because it is a common host strain for recombinant DNA product fermentations. Preferably, the host cell should secrete minimal amounts of proteolytic enzymes.

[0212] Host cells are transfected and preferably transformed with the above-described vectors and cultured in conventional nutrient media modified as appropriate for inducing promoters, selecting transformants, or amplifying the genes encoding the desired sequences.

[0213] Numerous methods of transfection are known to the ordinarily skilled artisan, for example, calcium phosphate and electroporation. Depending on the host cell used, transformation is done using standard techniques appropriate to such cells. The calcium treatment employing calcium chloride, as described in section 1.82 of Sambrook et al., Molecular Cloning: A Laboratory Manual, New York: Cold Spring Harbor Laboratory Press, (1989), is generally used for bacterial cells that contain substantial cell-wall barriers. Another method for transformation employs polyethylene glycol/DMSO, as described in Chung and Miller (Chung and Miller, Nucleic Acids Res. 16:3580 (1988); the entirety of which is herein incorporated by reference). Yet another method is the use of the technique termed electroporation.

[0214] Bacterial cells used to produce the polypeptide of interest for purposes of this invention are cultured in suitable media in which the promoters for the nucleic acid encoding the heterologous polypeptide can be artificially induced as described generally, e.g., in Sambrook et al., Molecular Cloning: A Laboratory Manual, New York: Cold Spring Harbor Laboratory Press, (1989). Examples of suitable media are given in U.S. Pat. Nos. 5,304,472 and 5,342,763; both of which are incorporated by reference in their entirety.

[0215] In addition to the above discussed procedures, practitioners are familiar with the standard resource materials which describe specific conditions and procedures for the construction, manipulation and isolation of macromolecules (e.g., DNA molecules, plasmids, etc.), generation of recombinant organisms and the screening and isolating of clones, (see for example, Sambrook et al., Molecular Cloning: A Laboratory Manual, Cold Spring Harbor Press (1989); Mailga et al., Methods in Plant Molecular Biology, Cold Spring Harbor Press (1995), the entirety of which is herein incorporated by reference; Birren et al., Genome Analysis: Analyzing DNA, 1, Cold Spring Harbor, N.Y., the entirety of which is herein incorporated by reference).

[0216] (e) Fungal Constructs and Transformed Fungal Cells

[0217] The present invention also relates to a fungal recombinant vector comprising exogenous genetic material. The present invention also relates to a fungal cell comprising a fungal recombinant vector. The present invention also relates to methods for obtaining a recombinant fungal host cell comprising introducing into a fungal host cell exogenous genetic material.

[0218] Exogenous genetic material may be transferred into a fungal cell. In a preferred embodiment the exogenous genetic material includes a nucleic acid molecule of the present invention having a sequence selected from the group consisting of SEQ ID NO: 1 through SEQ ID NO: 5,912 or complements thereof or fragments of either. The fungal recombinant vector may be any vector which can be conveniently subjected to recombinant DNA procedures. The choice of a vector will typically depend on the compatibility of the vector with the fungal host cell into which the vector is to be introduced. The vector may be a linear or a closed circular plasmid. The vector system may be a single vector or plasmid or two or more vectors or plasmids which together contain the total DNA to be introduced into the genome of the fungal host.

[0219] The fungal vector may be an autonomously replicating vector, i.e., a vector which exists as an extrachromosomal entity, the replication of which is independent of chromosomal replication, e.g., a plasmid, an extrachromosomal element, a minichromosome, or an artificial chromosome. The vector may contain any means for assuring self-replication. Alternatively, the vector may be one which, when introduced into the fungal cell, is integrated into the genome and replicated together with the chromosome(s) into which it has been integrated. For integration, the vector may rely on the nucleic acid sequence of the vector for stable integration of the vector into the genome by homologous or nonhomologous recombination. Alternatively, the vector may contain additional nucleic acid sequences for directing integration by homologous recombination into the genome of the fungal host. The additional nucleic acid sequences enable the vector to be integrated into the host cell genome at a precise location(s) in the chromosome(s). To increase the likelihood of integration at a precise location, there should be preferably two nucleic acid sequences which individually contain a sufficient number of nucleic acids, preferably 400 bp to 1500 bp, more preferably 800 bp to 1000 bp, which are highly homologous with the corresponding target sequence to enhance the probability of homologous recombination. These nucleic acid sequences may be any sequence that is homologous with a target sequence in the genome of the fungal host cell, and, furthermore, may be non-encoding or encoding sequences.

[0220] For autonomous replication, the vector may further comprise an origin of replication enabling the vector to replicate autonomously in the host cell in question. Examples of origin of replications for use in a yeast host cell are the 2 micron origin of replication and the combination of CEN3 and ARS 1. Any origin of replication may be used which is compatible with the fungal host cell of choice.

[0221] The fungal vectors of the present invention preferably contain one or more selectable markers which permit easy selection of transformed cells. A selectable marker is a gene the product of which provides, for example biocide or viral resistance, resistance to heavy metals, prototrophy to auxotrophs, and the like. The selectable marker may be selected from the group including, but not limited to, amdS (acetamidase), argB (ornithine carbamoyltransferase), bar (phosphinothricin acetyltransferase), hygB (hygromycin phosphotransferase), niaD (nitrate reductase), pyrG (orotidine-5′-phosphate decarboxylase), and sC (sulfate adenyltransferase), and trpC (anthranilate synthase). Preferred for use in an Aspergillus cell are the amdS and pyrG markers of Aspergillus nidulans or Aspergillus oryzae and the bar marker of Streptomyces hygroscopicus. Furthermore, selection may be accomplished by co-transformation, e.g., as described in WO 91/17243, the entirety of which is herein incorporated by reference. A nucleic acid sequence of the present invention may be operably linked to a suitable promoter sequence. The promoter sequence is a nucleic acid sequence which is recognized by the fungal host cell for expression of the nucleic acid sequence. The promoter sequence contains transcription and translation control sequences which mediate the expression of the protein or fragment thereof.

[0222] A promoter may be any nucleic acid sequence which shows transcriptional activity in the fungal host cell of choice and may be obtained from genes encoding polypeptides either homologous or heterologous to the host cell. Examples of suitable promoters for directing the transcription of a nucleic acid construct of the invention in a filamentous fungal host are promoters obtained from the genes encoding Aspergillus oryzae TAKA amylase, Rhizomucor miehei aspartic proteinase, Aspergillus niger neutral alpha-amylase, Aspergillus niger acid stable alpha-amylase, Aspergillus niger or Aspergillus awamori glucoamylase (glaA), Rhizomucor miehei lipase, Aspergillus oryzae alkaline protease, Aspergillus oryzae triose phosphate isomerase, Aspergillus nidulans acetamidase, and hybrids thereof. In a yeast host, a useful promoter is the Saccharomyces cerevisiae enolase (eno-1) promoter. Particularly preferred promoters are the TAKA amylase, NA2-tpi (a hybrid of the promoters from the genes encoding Aspergillus niger neutral alpha -amylase and Aspergillus oryzae triose phosphate isomerase), and glaA promoters.

[0223] A protein or fragment thereof encoding nucleic acid molecule of the present invention may also be operably linked to a terminator sequence at its 3′ terminus. The terminator sequence may be native to the nucleic acid sequence encoding the protein or fragment thereof or may be obtained from foreign sources. Any terminator which is functional in the fungal host cell of choice may be used in the present invention, but particularly preferred terminators are obtained from the genes encoding Aspergillus oryzae TAKA amylase, Aspergillus niger glucoamylase, Aspergillus nidulans anthranilate synthase, Aspergillus niger alpha-glucosidase, and Saccharomyces cerevisiae enolase.

[0224] A protein or fragment thereof encoding nucleic acid molecule of the present invention may also be operably linked to a suitable leader sequence. A leader sequence is a nontranslated region of a MRNA which is important for translation by the fungal host. The leader sequence is operably linked to the 5′ terminus of the nucleic acid sequence encoding the protein or fragment thereof. The leader sequence may be native to the nucleic acid sequence encoding the protein or fragment thereof or may be obtained from foreign sources. Any leader sequence which is functional in the fungal host cell of choice may be used in the present invention, but particularly preferred leaders are obtained from the genes encoding Aspergillus oryzae TAKA amylase and Aspergillus oryzae triose phosphate isomerase.

[0225] A polyadenylation sequence may also be operably linked to the 3′ terminus of the nucleic acid sequence of the present invention. The polyadenylation sequence is a sequence which when transcribed is recognized by the fungal host to add polyadenosine residues to transcribed MRNA. The polyadenylation sequence may be native to the nucleic acid sequence encoding the protein or fragment thereof or may be obtained from foreign sources. Any polyadenylation sequence which is functional in the fungal host of choice may be used in the present invention, but particularly preferred polyadenylation sequences are obtained from the genes encoding Aspergillus oryzae TAKA amylase, Aspergillus niger glucoamylase, Aspergillus nidulans anthranilate synthase, and Aspergillus niger alpha-glucosidase.

[0226] To avoid the necessity of disrupting the cell to obtain the protein or fragment thereof, and to minimize the amount of possible degradation of the expressed protein or fragment thereof within the cell, it is preferred that expression of the protein or fragment thereof gives rise to a product secreted outside the cell. To this end, a protein or fragment thereof of the present invention may be linked to a signal peptide linked to the amino terminus of the protein or fragment thereof. A signal peptide is an amino acid sequence which permits the secretion of the protein or fragment thereof from the fungal host into the culture medium. The signal peptide may be native to the protein or fragment thereof of the invention or may be obtained from foreign sources. The 5′ end of the coding sequence of the nucleic acid sequence of the present invention may inherently contain a signal peptide coding region naturally linked in translation reading frame with the segment of the coding region which encodes the secreted protein or fragment thereof. Alternatively, the 5′ end of the coding sequence may contain a signal peptide coding region which is foreign to that portion of the coding sequence which encodes the secreted protein or fragment thereof. The foreign signal peptide may be required where the coding sequence does not normally contain a signal peptide coding region. Alternatively, the foreign signal peptide may simply replace the natural signal peptide to obtain enhanced secretion of the desired protein or fragment thereof. The foreign signal peptide coding region may be obtained from a glucoamylase or an amylase gene from an Aspergillus species, a lipase or proteinase gene from Rhizomucor miehei, the gene for the alpha-factor from Saccharomyces cerevisiae, or the calf preprochymosin gene. An effective signal peptide for fungal host cells is the Aspergillus oryzae TAKA amylase signal, Aspergillus niger neutral amylase signal, the Rhizomucor miehei aspartic proteinase signal, the Humicola lanuginosus cellulase signal, or the Rhizomucor miehei lipase signal. However, any signal peptide capable of permitting secretion of the protein or fragment thereof in a fungal host of choice may be used in the present invention.

[0227] A protein or fragment thereof encoding nucleic acid molecule of the present invention may also be linked to a propeptide coding region. A propeptide is an amino acid sequence found at the amino terminus of aproprotein or proenzyme. Cleavage of the propeptide from the proprotein yields a mature biochemically active protein. The resulting polypeptide is known as a propolypeptide or proenzyme (or a zymogen in some cases). Propolypeptides are generally inactive and can be converted to mature active polypeptides by catalytic or autocatalytic cleavage of the propeptide from the propolypeptide or proenzyme. The propeptide coding region may be native to the protein or fragment thereof or may be obtained from foreign sources. The foreign propeptide coding region may be obtained from the Saccharomyces cerevisiae alpha-factor gene or Myceliophthora thermophila laccase gene (WO 95/33836, the entirety of which is herein incorporated by reference).

[0228] The procedures used to ligate the elements described above to construct the recombinant expression vector of the present invention are well known to one skilled in the art (see, for example, Sambrook et al., Molecular Cloning, A Laboratory Manual, 2nd ed., Cold Spring Harbor, N.Y., (1989)).

[0229] The present invention also relates to recombinant fungal host cells produced by the methods of the present invention which are advantageously used with the recombinant vector of the present invention. The cell is preferably transformed with a vector comprising a nucleic acid sequence of the invention followed by integration of the vector into the host chromosome. The choice of fungal host cells will to a large extent depend upon the gene encoding the protein or fragment thereof and its source. The fungal host cell may, for example, be a yeast cell or a filamentous fungal cell.

[0230] “Yeast” as used herein includes Ascosporogenous yeast (Endomycetales), Basidiosporogenous yeast, and yeast belonging to the Fungi Imperfecti (Blastomycetes). The Ascosporogenous yeasts are divided into the families Spennophthoraceae and Saccharomycetaceae. The latter is comprised of four subfamilies, Schizosaccharomycoideae (for example, genus Schizosaccharomyces), Nadsonioideae, Lipomycoideae, and Saccharomycoideae (for example, genera Pichia, Kluyveromyces and Saccharomyces). The Basidiosporogenous yeasts include the genera Leucosporidim, Rhodosporidium, Sporidiobolus, Filobasidium, and Filobasidiella. Yeast belonging to the Fungi Imperfecti are divided into two families, Sporobolomycetaceae (for example, genera Sorobolomyces and Bullera) and Cryptococcaceae (for example, genus Candida). Since the classification of yeast may change in the future, for the purposes of this invention, yeast shall be defined as described in Biology and Activities of Yeast (Skinner et al., Soc. App. Bacteriol. Symposium Series No. 9, (1980), the entirety of which is herein incorporated by reference). The biology of yeast and manipulation of yeast genetics are well known in the art (see, for example, Biochemistry and Genetics of Yeast, Bacil et al. (ed.), 2nd edition, 1987; The Yeasts, Rose and Harrison (eds.), 2nd ed., (1987); and The Molecular Biology of the Yeast Saccharomyces, Strathem et al. (eds.), (1981), all of which are herein incorporated by reference in their entirety).

[0231] “Fungi” as used herein includes the phyla Ascomycota, Basidiomycota, Chytridiomycota, and Zygomycota (as defined by Hawksworth et al., In: Ainsworth and Bisby's Dictionary of The Fungi, 8th edition, 1995, CAB International, University Press, Cambridge, UK; the entirety of which is herein incorporated by reference) as well as the Oomycota (as cited in Hawksworth et al., In: Ainsworth and Bisby's Dictionary of The Fungi, 8th edition, 1995, CAB International, University Press, Cambridge, UK) and all mitosporic fungi (Hawksworth et al., In: Ainsworth and Bisby's Dictionary of The Fungi, 8th edition, 1995, CAB International, University Press, Cambridge, UK). Representative groups of Ascomycota include, for example, Neurospora, Eupenicillium (=Penicillium), Emericella (=Aspergillus), Eurotiun (=Aspergillus), and the true yeasts listed above. Examples of Basidiomycota include mushrooms, rusts, and smuts. Representative groups of Chytridiomycota include, for example, Allomyces, Blastocladiella, Coelomomyces, and aquatic fungi. Representative groups of Oomycota include, for example, Saprolegniomycetous aquatic fungi (water molds) such as Achlya. Examples of mitosporic fungi include Aspergillus, Penicilliun, Candida, and Alternaria. Representative groups of Zygomycota include, for example, Rhizopus and Mucor.

[0232] “Filamentous fungi” include all filamentous forms of the subdivision Eumycota and Oomycota (as defined by Hawksworth et al., In: Ainsworth and Bisby's Dictionary of The Fungi, 8th edition, 1995, CAB International, University Press, Cambridge, UK). The filamentous fungi are characterized by a vegetative mycelium composed of chitin, cellulose, glucan, chitosan, mannan, and other complex polysaccharides. Vegetative growth is by hyphal elongation and carbon catabolism is obligately aerobic. In contrast, vegetative growth by yeasts such as Saccharomyces cerevisiae is by budding of a unicellular thallus and carbon catabolism may be fermentative.

[0233] In one embodiment, the fungal host cell is a yeast cell. In a preferred embodiment, the yeast host cell is a cell of the species of Candida, Kluyveromyces, Saccharomyces, Schizosaccharomyces, Pichia, and Yarrowia. In a preferred embodiment, the yeast host cell is a Saccharomyces cerevisiae cell, a Saccharomyces carlsbergensis, Saccharomyces diastaticus cell, a Saccharomyces douglasii cell, a Saccharomyces kluyveri cell, a Saccharomyces norbensis cell, or a Saccharomyces oviformis cell. In another preferred embodiment, the yeast host cell is a Kluyveromyces lactis cell. In another preferred embodiment, the yeast host cell is a Yarrowia lipolytica cell.

[0234] In another embodiment, the fungal host cell is a filamentous fungal cell. In a preferred embodiment, the filamentous fungal host cell is a cell of the species of, but not limited to, Acremonium, Aspergillus, Fusarium, Humicola, Myceliophthora, Mucor, Neurospora, Penicillium, Thielavia, Tolypocladium, and Trichodenna. In a preferred embodiment, the filamentous fungal host cell is an Aspergillus cell. In another preferred embodiment, the filamentous fungal host cell is an Acremonium cell. In another preferred embodiment, the filamentous fungal host cell is a Fusarium cell. In another preferred embodiment, the filamentous fungal host cell is a Humicola cell. In another preferred embodiment, the filamentous fungal host cell is a Myceliophthora cell. In another even preferred embodiment, the filamentous fungal host cell is a Mucor cell. In another preferred embodiment, the filamentous fungal host cell is a Neurospora cell. In another preferred embodiment, the filamentous fungal host cell is a Penicillium cell. In another preferred embodiment, the filamentous fungal host cell is a Thielavia cell. In another preferred embodiment, the filamentous fungal host cell is a Tolypocladiun cell. In another preferred embodiment, the filamentous fungal host cell is a Trichodenna cell. In a preferred embodiment, the filamentous fungal host cell is an Aspergillus oryzae cell, an Aspergillus niger cell, an Aspergillus foetidus cell, or an Aspergillus japonicus cell. In another preferred embodiment, the filamentous fungal host cell is a Fusarium oxysporum cell or a Fusarium graminearum cell. In another preferred embodiment, the filamentous fungal host cell is a Humicola insolens cell or a Humicola lanuginosus cell. In another preferred embodiment, the filamentous fungal host cell is a Myceliophthora thennophila cell. In a most preferred embodiment, the filamentous fungal host cell is a Mucor miehei cell. In a most preferred embodiment, the filamentous fungal host cell is a Neurospora crassa cell. In a most preferred embodiment, the filamentous fungal host cell is a Penicillium purpurogenum cell. In another most preferred embodiment, the filamentous fungal host cell is a Thielavia terrestris cell. In another most preferred embodiment, the Trichoderma cell is a Trichoderma reesei cell, a Trichoderma viride cell, a Trichoderma longibrachiatum cell, a Trichoderma harzianum cell, or a Trichoderma koningii cell. In a preferred embodiment, the fungal host cell is selected from an A. nidulans cell, an A. niger cell, an A. oryzae cell and an A. sojae cell. In a further preferred embodiment, the fungal host cell is an A. nidulans cell.

[0235] The recombinant fungal host cells of the present invention may further comprise one or more sequences which encode one or more factors that are advantageous in the expression of the protein or fragment thereof, for example, an activator (e.g., a trans-acting factor), a chaperone, and a processing protease. The nucleic acids encoding one or more of these factors are preferably not operably linked to the nucleic acid encoding the protein or fragment thereof. An activator is a protein which activates transcription of a nucleic acid sequence encoding a polypeptide (Kudla et al., EMBO 9:1355-1364(1990); Jarai and Buxton, Current Genetics 26:2238-244(1994); Verdier, Yeast 6:271-297(1990), all of which are herein incorporated by reference in their entirety). The nucleic acid sequence encoding an activator may be obtained from the genes encoding Saccharomyces cerevisiae heme activator protein 1 (hap1), Saccharomyces cerevisiae galactose metabolizing protein 4 (gal4), and Aspergillus nidulans ammonia regulation protein (areA). For further examples, see Verdier, Yeast 6:271-297 (1990); MacKenzie et al., Journal of Gen. Microbiol. 139:2295-2307 (1993), both of which are herein incorporated by reference in their entirety). A chaperone is a protein which assists another protein in folding properly (Hartl et al., TIBS 19:20-25 (1994); Bergeron et al., TIBS 19:124-128 (1994); Demolder et al., J. Biotechnology 32:179-189 (1994); Craig, Science 260:1902-1903(1993); Gething and Sambrook, Nature 355:33-45 (1992); Puig and Gilbert, J Biol. Chem. 269:7764-7771 (1994); Wang and Tsou, FASEB Journal 7:1515-11157 (1993); Robinson et al., Bio/Technology 1:381-384 (1994), all of which are herein incorporated by reference in their entirety). The nucleic acid sequence encoding a chaperone may be obtained from the genes encoding Aspergillus oryzae protein disulphide isomerase, Saccharomyces cerevisiae calnexin, Saccharomyces cerevisiae BiP/GRP78, and Saccharomyces cerevisiae Hsp70. For further examples, see Gething and Sambrook, Nature 355:33-45 (1992); Hartl et al., TIBS 19:20-25 (1994). A processing protease is a protease that cleaves a propeptide to generate a mature biochemically active polypeptide (Enderlin and Ogrydziak, Yeast 10:67-79 (1994); Fuller et al., Proc. Natl. Acad. Sci. (U.S.A.) 86:1434-1438 (1989); Julius et al., Cell 37:1075-1089 (1984); Julius et al., Cell 32:839-852 (1983), all of which are incorporated by reference in their entirety). The nucleic acid sequence encoding a processing protease may be obtained from the genes encoding Aspergillus niger Kex2, Saccharomyces cerevisiae dipeptidylaminopeptidase, Saccharomyces cerevisiae Kex2, and Yarrowia lipolytica dibasic processing endoprotease (xpr6). Any factor that is functional in the fungal host cell of choice may be used in the present invention.

[0236] Fungal cells may be transformed by a process involving protoplast formation, transformation of the protoplasts, and regeneration of the cell wall in a manner known per se. Suitable procedures for transformation of Aspergillus host cells are described in EP 238 023 and Yelton et al., Proc. Natl. Acad. Sci. (U.S.A.) 81:1470-1474 (1984), both of which are herein incorporated by reference in their entirety. A suitable method of transforming Fusarium species is described by Malardier et al., Gene 78:147-156 (1989), the entirety of which is herein incorporated by reference. Yeast may be transformed using the procedures described by Becker and Guarente, In: Abelson and Simon, (eds.), Guide to Yeast Genetics and Molecular Biology, Methods Enzymol. Volume 194, pp 182-187, Academic Press, Inc., New York; Ito et al., J. Bacteriology 153:163 (1983); Hinnen et al., Proc. Natl. Acad. Sci. (U.S.A.) 75:1920 (1978), all of which are herein incorporated by reference in their entirety.

[0237] The present invention also relates to methods of producing the protein or fragment thereof comprising culturing the recombinant fungal host cells under conditions conducive for expression of the protein or fragment thereof. The fungal cells of the present invention are cultivated in a nutrient medium suitable for production of the protein or fragment thereof using methods known in the art. For example, the cell may be cultivated by shake flask cultivation, small-scale or large-scale fermentation (including continuous, batch, fed-batch, or solid state fermentations) in laboratory or industrial fermentors performed in a suitable medium and under conditions allowing the protein or fragment thereof to be expressed and/or isolated. The cultivation takes place in a suitable nutrient medium comprising carbon and nitrogen sources and inorganic salts, using procedures known in the art (see, e.g., Bennett, and LaSure (eds.), More Gene Manipulations in Fungi, Academic Press, CA, (1991), the entirety of which is herein incorporated by reference). Suitable media are available from commercial suppliers or may be prepared according to published compositions (e.g., in catalogues of the American Type Culture Collection, Manassas, Va.). If the protein or fragment thereof is secreted into the nutrient medium, a protein or fragment thereof can be recovered directly from the medium. If the protein or fragment thereof is not secreted, it is recovered from cell lysates.

[0238] The expressed protein or fragment thereof may be detected using methods known in the art that are specific for the particular protein or fragment. These detection methods may include the use of specific antibodies, formation of an enzyme product, or disappearance of an enzyme substrate. For example, if the protein or fragment thereof has enzymatic activity, an enzyme assay may be used. Alternatively, if polyclonal or monoclonal antibodies specific to the protein or fragment thereof are available, immunoassays may be employed using the antibodies to the protein or fragment thereof. The techniques of enzyme assay and immunoassay are well known to those skilled in the art.

[0239] The resulting protein or fragment thereof may be recovered by methods known in the arts.

[0240] For example, the protein or fragment thereof may be recovered from the nutrient medium by conventional procedures including, but not limited to, centrifugation, filtration, extraction, spray-drying, evaporation, or precipitation. The recovered protein or fragment thereof may then be further purified by a variety of chromatographic procedures, e.g., ion exchange chromatography, gel filtration chromatography, affinity chromatography, or the like.

[0241] (f) Plant Constructs, Transformed Plant Cells and Plant Transformants

[0242] One or more of the nucleic acid molecules of the present invention may be used in plant transformation or transfection. Exogenous genetic material may be transferred into a plant cell and the plant cell regenerated into a whole, fertile or sterile plant. Such genetic material may be transferred into either monocotyledons and dicotyledons including, but not limited to maize (pp 63-69), soybean (pp 50-60), Arabidopsis (p 45), phaseolus (pp 47-49), peanut (pp 49-50), alfalfa (p 60), wheat (pp 69-71), rice (pp 72-79), oat (pp 80-81), sorghum (p 83), rye (p 84), tritordeum (p 84), millet (p85), fescue (p 85), perennial ryegrass (p 86), sugarcane (p87), cranberry (p101), papaya (pp 101-102), banana (p 103), banana (p 103), muskmelon (p 104), apple (p 104), cucumber (p 105), dendrobium (p 109), gladiolus (p 110), chrysanthemum (p 110), liliacea (p 111), cotton (ppll3-114), eucalyptus (p 115), sunflower (p 118), canola (p 118), turfgrass (p121), sugarbeet (p 122), coffee (p 122), and dioscorea (p 122), (Christou, In: Particle Bombardment for Genetic Engineering of Plants, Biotechnology Intelligence Unit. Academic Press, San Diego, Calif. (1996), the entirety of which is herein incorporated by reference).

[0243] Transfer of a nucleic acid that encodes for a protein can result in overexpression of that protein in a transformed cell or genetically improved plant. One or more of the proteins or fragments thereof encoded by nucleic acid molecules of the present invention may be overexpressed in a transformed cell or transformed plant. Particularly, any of the proteins or fragments thereof of the present invention may be overexpressed in a transformed cell or genetically improved plant. Such overexpression may be the result of transient or stable transfer of the exogenous genetic material.

[0244] Exogenous genetic material may be transferred into a plant cell and the plant cell by the use of a DNA vector or construct designed for such a purpose. Design of such a vector is generally within the skill of the art (See, Plant Molecular Biology: A Laboratory Manual, Clark (ed.), Springier, N.Y. (1997), the entirety of which is herein incorporated by reference).

[0245] A construct or vector may include a plant promoter to express the protein or protein fragment of choice. A number of promoters which are active in plant cells have been described in the literature. These include the nopaline synthase (NOS) promoter (Ebert et al., Proc. Natl. Acad. Sci. (U.S.A.) 84:5745-5749 (1987), the entirety of which is herein incorporated by reference), the octopine synthase (OCS) promoter (which are carried on tumor-inducing plasmids of Agrobacterium tumefaciens), the caulimovirus promoters such as the cauliflower mosaic virus (CaMV) 19S promoter (Lawton et al., Plant Mol. Biol. 9:315-324 (1987), the entirety of which is herein incorporated by reference) and the CAMV 35S promoter (Odell et al., Nature 313:810-812 (1985), the entirety of which is herein incorporated by reference), the figwort mosaic virus 35S-promoter, the light-inducible promoter from the small subunit of ribulose-1,5-bis-phosphate carboxylase (ssRUBISCO), the Adh promoter (Walker et al., Proc. Natl. Acad. Sci. (U.S.A.) 84:6624-6628 (1987), the entirety of which is herein incorporated by reference), the sucrose synthase promoter (Yang et al., Proc. Natl. Acad. Sci. (U.S.A.) 87:4144-4148 (1990), the entirety of which is herein incorporated by reference), the R gene complex promoter (Chandler et al., The Plant Cell 1:1175-1183 (1989), the entirety of which is herein incorporated by reference), and the chlorophyll a/b binding protein gene promoter, etc. These promoters have been used to create DNA constructs which have been expressed in plants; see, e.g., PCT publication WO 84/02913, herein incorporated by reference in its entirety.

[0246] Promoters which are known or are found to cause transcription of DNA in plant cells can be used in the present invention. Such promoters may be obtained from a variety of sources such as plants and plant viruses. It is preferred that the particular promoter selected should be capable of causing sufficient expression to result in the production of an effective amount of the protein of the present invention to cause the desired phenotype. In addition to promoters that are known to cause transcription of DNA in plant cells, other promoters may be identified for use in the current invention by screening a plant cDNA library for genes which are selectively or preferably expressed in the target tissues or cells.

[0247] For the purpose of expression in source tissues of the plant, such as the leaf, seed, root or stem, it is preferred that the promoters utilized in the present invention have relatively high expression in these specific tissues. For this purpose, one may choose from a number of promoters for genes with tissue- or cell-specific or -enhanced expression. Examples of such promoters reported in the literature include the chloroplast glutamine synthetase GS2 promoter from pea (Edwards et al., Proc. Natl. Acad. Sci. (U.S.A.) 87:3459-3463 (1990), herein incorporated by reference in its entirety), the chloroplast fructose-1,6-biphosphatase (FBPase) promoter from wheat (Lloyd et al., Mol. Gen. Genet. 225:209-216 (1991), herein incorporated by reference in its entirety), the nuclear photosynthetic ST-LS 1 promoter from potato (Stockhaus et al., EMBO J. 8:2445-2451 (1989), herein incorporated by reference in its entirety), the serine/threonine kinase (PAL) promoter and the glucoamylase (CHS) promoter from Arabidopsis thaliana. Also reported to be active in photosynthetically active tissues are the ribulose-1,5-bisphosphate carboxylase (RbcS) promoter from eastern larch (Larix laricina), the promoter for the cab gene, cab6, from pine (Yamamoto et al., Plant Cell Physiol. 35:773-778 (1994), herein incorporated by reference in its entirety), the promoter for the Cab-1 gene from wheat (Fejes et al., Plant Mol. Biol. 15:921-932 (1990), herein incorporated by reference in its entirety), the promoter for the CAB-1 gene from spinach (Lubberstedt et al., Plant Physiol. 104:997-1006 (1994), herein incorporated by reference in its entirety), the promoter for the cab1R gene from rice (Luan et al., Plant Cell 4:971-981 (1992), the entirety of which is herein incorporated by reference), the pyruvate, orthophosphate dikinase (PPDK) promoter from maize (Matsuoka et al., Proc. Natl. Acad. Sci. (U.S.A.) 90:9586-9590 (1993), herein incorporated by reference in its entirety), the promoter for the tobacco Lhcb1*2 gene (Cerdan et al., Plant Mol. Biol. 33:245-255 (1997), herein incorporated by reference in its entirety), the Arabidopsis thaliana SUC2 sucrose-H + symporter promoter (Truernit et al., Planta. 196:564-570 (1995), herein incorporated by reference in its entirety), and the promoter for the thylakoid membrane proteins from spinach (psaD, psaF, psae, PC, FNR, atpC, atpD, cab, rbcS). Other promoters for the chlorophyll a/b-binding proteins may also be utilized in the present invention, such as the promoters for LhcB gene and PsbP gene from white mustard (Sinapis alba; Kretsch et al., Plant Mol. Biol. 28:219-229 (1995), the entirety of which is herein incorporated by reference).

[0248] For the purpose of expression in sink tissues of the plant, such as the tuber of the potato plant, the fruit of tomato, or the seed of maize, wheat, rice, and barley, it is preferred that the promoters utilized in the present invention have relatively high expression in these specific tissues. A number of promoters for genes with tuber-specific or -enhanced expression are known, including the class I patatin promoter (Bevan et al., EMBO J. 8:1899-1906 (1986); Jefferson et al., Plant Mol. Biol. 14:995-1006 (1990), both of which are herein incorporated by reference in its entirety), the promoter for the potato tuber ADPGPP genes, both the large and small subunits, the sucrose synthase promoter (Salanoubat and Belliard, Gene. 60:47-56 (1987), Salanoubat and Belliard, Gene. 84:181-185 (1989), both of which are incorporated by reference in their entirety), the promoter for the major tuber proteins including the 22 kd protein complexes and proteinase inhibitors (Hannapel, Plant Physiol. 101:703-704 (1993), herein incorporated by reference in its entirety), the promoter for the granule bound starch synthase gene (GBSS) (Visser et al., Plant Mol. Biol. 17:691-699 (1991), herein incorporated by reference in its entirety), and other class I and II patatins promoters (Koster-Topfer et al., Mol. Gen. Genet. 219:390-396 (1989); Mignery et al., Gene. 62:27-44 (1988), both of which are herein incorporated by reference in their entirety).

[0249] Other promoters can also be used to express a protein or fragment thereof of the present invention in specific tissues, such as seeds or fruits. The promoter for β-conglycinin (Chen et al., Dev. Genet. 10:112-122 (1989), herein incorporated by reference in its entirety) or other seed-specific promoters such as the napin and phaseolin promoters, can be used. The zeins are a group of storage proteins found in maize endosperm. Genomic clones for zein genes have been isolated (Pedersen et al., Cell 29:1015-1026 (1982), herein incorporated by reference in its entirety), and the promoters from these clones, including the 15 kD, 16 kD, 19 kD, 22 kD, 27 kD, and gamma genes, could also be used. Other promoters known to function, for example, in maize include the promoters for the following genes: waxy, Brittle, Shrunken 2, Branching enzymes I and II, starch synthases, debranching enzymes, oleosins, glutelins, and sucrose synthases. A particularly preferred promoter for maize endosperm expression is the promoter for the glutelin gene from rice, more particularly the Osgt- 1 promoter (Zheng et al., Mol. Cell Biol. 13:5829-5842 (1993), herein incorporated by reference in its entirety). Examples of promoters suitable for expression in wheat include those promoters for the ADPglucose pyrosynthase (ADPGPP) subunits, the granule bound and other starch synthase, the branching and debranching enzymes, the embryogenesis-abundant proteins, the gliadins, and the glutenins. Examples of such promoters in rice include those promoters for the ADPGPP subunits, the granule bound and other starch synthase, the branching enzymes, the debranching enzymes, sucrose synthases, and the glutelins. A particularly preferred promoter is the promoter for rice glutelin, Osgt-1. Examples of such promoters for barley include those for the ADPGPP subunits, the granule bound and other starch synthase, the branching enzymes, the debranching enzymes, sucrose synthases, the hordeins, the embryo globulins, and the aleurone specific proteins.

[0250] Root specific promoters may also be used. An example of such a promoter is the promoter for the acid chitinase gene (Samac et al., Plant Mol. Biol. 25:587-596 (1994), the entirety of which is herein incorporated by reference). Expression in root tissue could also be accomplished by utilizing the root specific subdomains of the CaMV35S promoter that have been identified (Lam et al., Proc. Natl. Acad. Sci. (U.S.A.) 86:7890-7894 (1989), herein incorporated by reference in its entirety). Other root cell specific promoters include those reported by Conkling et al. (Conkling et al., Plant Physiol. 93:1203-1211 (1990), the entirety of which is herein incorporated by reference).

[0251] Additional promoters that may be utilized are described, for example, in U.S. Pat. Nos. 5,378,619; 5,391,725; 5,428,147; 5,447,858; 5,608,144; 5,608,144; 5,614,399; 5,633,441; 5,633,435; and 4,633,436, all of which are herein incorporated in their entirety. In addition, a tissue specific enhancer may be used (Fromm et al., The Plant Cell 1:977-984 (1989), the entirety of which is herein incorporated by reference).

[0252] Constructs or vectors may also include with the coding region of interest a nucleic acid sequence that acts, in whole or in part, to terminate transcription of that region. For example, such sequences have been isolated including the Tr7 3′ sequence and the NOS 3′ sequence (Ingelbrecht et al., The Plant Cell 1:671-680 (1989), the entirety of which is herein incorporated by reference; Bevan et al., Nucleic Acids Res. 11:369-385 (1983), the entirety of which is herein incorporated by reference), or the like.

[0253] A vector or construct may also include regulatory elements. Examples of such include the Adh intron 1 (Callis et al., Genes and Develop. 1:1183-1200 (1987), the entirety of which is herein incorporated by reference), the sucrose synthase intron (Vasil et al., Plant Physiol. 91:1575-1579 (1989), the entirety of which is herein incorporated by reference) and the TMV omega element (Gallie et al., The Plant Cell 1:301-311 (1989), the entirety of which is herein incorporated by reference). These and other regulatory elements may be included when appropriate.

[0254] A vector or construct may also include a selectable marker. Selectable markers may also be used to select for plants or plant cells that contain the exogenous genetic material. Examples of such include, but are not limited to, a neo gene (Potrykus et al., Mol. Gen. Genet. 199:183-188 (1985), the entirety of which is herein incorporated by reference) which codes for kanamycin resistance and can be selected for using kanamycin, G418, etc.; a bar gene which codes for bialaphos resistance; a mutant EPSP synthase gene (Hinchee et al., Bio/Technology 6:915-922 (1988), the entirety of which is herein incorporated by reference) which encodes glyphosate resistance; a nitrilase gene which confers resistance to bromoxynil (Stalker et al., J. Biol. Chem. 263:6310-6314 (1988), the entirety of which is herein incorporated by reference); a mutant acetolactate synthase gene (ALS) which confers imidazolinone or sulphonylurea resistance (European Patent Application 154,204 (Sep. 11, 1985), the entirety of which is herein incorporated by reference); and a methotrexate resistant DHFR gene (Thillet et al., J. Biol. Chem. 263:12500-12508 (1988), the entirety of which is herein incorporated by reference).

[0255] A vector or construct may also include a transit peptide. Incorporation of a suitable chloroplast transit peptide may also be employed (European Patent Application Publication Number 0218571, the entirety of which is herein incorporated by reference). Translational enhancers may also be incorporated as part of the vector DNA. DNA constructs could contain one or more 5′ non-translated leader sequences which may serve to enhance expression of the gene products from the resulting mRNA transcripts. Such sequences may be derived from the promoter selected to express the gene or can be specifically modified to increase translation of the mRNA. Such regions may also be obtained from viral RNAs, from suitable eukaryotic genes, or from a synthetic gene sequence. For a review of optimizing expression of transgenes, see Koziel et al., Plant Mol. Biol. 32:393-405 (1996), the entirety of which is herein incorporated by reference.

[0256] A vector or construct may also include a screenable marker. Screenable markers may be used to monitor expression. Exemplary screenable markers include a β-glucuronidase or uidA gene (GUS) which encodes an enzyme for which various chromogenic substrates are known (Jefferson, Plant Mol. Biol, Rep. 5:387-405 (1987), the entirety of which is herein incorporated by reference; Jefferson et al., EMBO J. 6:3901-3907 (1987), the entirety of which is herein incorporated by reference); an R-locus gene, which encodes a product that regulates the production of anthocyanin pigments (red color) in plant tissues (Dellaporta et al., Stadler Symposium 11:263-282 (1988), the entirety of which is herein incorporated by reference); a β-lactamase gene (Sutcliffe et al., Proc. Natl. Acad. Sci. (U.S.A.) 75:3737-3741 (1978), the entirety of which is herein incorporated by reference), a gene which encodes an enzyme for which various chromogenic substrates are known (e.g., PADAC, a chromogenic cephalosporin); a luciferase gene (Ow et al., Science 234:856-859 (1986), the entirety of which is herein incorporated by reference); a xylE gene (Zukowsky et al., Proc. Natl. Acad. Sci. (U.S.A.) 80:1101-1105 (1983), the entirety of which is herein incorporated by reference) which encodes a catechol diozygenase that can convert chromogenic catechols; an α-amylase gene (Ikatu et al., Bio/Technol. 8:241-242 (1990), the entirety of which is herein incorporated by reference); a tyrosinase gene (Katz et al., J. Gen. Microbiol. 129:2703-2714 (1983), the entirety of which is herein incorporated by reference) which encodes an enzyme capable of oxidizing tyrosine to DOPA and dopaquinone which in turn condenses to melanin; an α-galactosidase, which will turn a chromogenic α-galactose substrate.

[0257] Included within the terms “selectable or screenable marker genes” are also genes which encode a secretable marker whose secretion can be detected as a means of identifying or selecting for transformed cells. Examples include markers which encode a secretable antigen that can be identified by antibody interaction, or even secretable enzymes which can be detected catalytically. Secretable proteins fall into a number of classes, including small, diffusible proteins which are detectable, (e.g., by ELISA), small active enzymes which are detectable in extracellular solution (e.g., α-amylase, β-lactamase, phosphinothricin transferase), or proteins which are inserted or trapped in the cell wall (such as proteins which include a leader sequence such as that found in the expression unit of extension or tobacco PR-S). Other possible selectable and/or screenable marker genes will be apparent to those of skill in the art.

[0258] There are many methods for introducing transforming nucleic acid molecules into plant cells. Suitable methods are believed to include virtually any method by which nucleic acid molecules may be introduced into a cell, such as by Agrobacterium infection or direct delivery of nucleic acid molecules such as, for example, by PEG-mediated transformation, by electroporation or by acceleration of DNA coated particles, etc (Potrykus, Ann. Rev. Plant Physiol. Plant Mol. Biol. 42:205-225 (1991), the entirety of which is herein incorporated by reference; Vasil, Plant Mol. Biol. 25:925-937 (1994), the entirety of which is herein incorporated by reference). For example, electroporation has been used to transform maize protoplasts (Fromm et al., Nature 312:791-793 (1986), the entirety of which is herein incorporated by reference).

[0259] Other vector systems suitable for introducing transforming DNA into a host plant cell include but are not limited to binary artificial chromosome (BIBAC) vectors (Hamilton et al., Gene 200:107-116 (1997), the entirety of which is herein incorporated by reference); and transfection with RNA viral vectors (Della-Cioppa et al., Ann. N.Y. Acad. Sci. (1996), 792 (Engineering Plants for Commercial Products and Applications), 57-61, the entirety of which is herein incorporated by reference). Additional vector systems also include plant selectable YAC vectors such as those described in Mullen et al., Molecular Breeding 4:449-457 (1988), the entireity of which is herein incorporated by reference).

[0260] Technology for introduction of DNA into cells is well known to those of skill in the art. Four general methods for delivering a gene into cells have been described: (1) chemical methods (Graham and van der Eb, Virology 54:536-539 (1973), the entirety of which is herein incorporated by reference); (2) physical methods such as microinjection (Capecchi, Cell 22:479-488 (1980), the entirety of which is herein incorporated by reference), electroporation (Wong and Neumann, Biochem. Biophys. Res. Commun. 107:584-587 (1982); Fromm et al., Proc. Natl. Acad. Sci. (U.S.A.) 82:5824-5828 (1985); U.S. Pat. No.5,384,253, all of which are herein incorporated in their entirety); and the gene gun (Johnston and Tang, Methods Cell Biol. 43:353-365 (1994), the entirety of which is herein incorporated by reference); (3) viral vectors (Clapp, Clin. Perinatol. 20:155-168 (1993); Lu et al., J. Exp. Med. 178:2089-2096 (1993); Eglitis and Anderson, Biotechniques 6:608-614 (1988), all of which are herein incorporated in their entirety); and (4) receptor-mediated mechanisms (Curiel et al., Hum. Gen. Ther. 3:147-154 (1992), Wagner et al., Proc. Natl. Acad. Sci. (USA) 89:6099-6103 (1992), both of which are incorporated by reference in their entirety).

[0261] Acceleration methods that may be used include, for example, microprojectile bombardment and the like. One example of a method for delivering transforming nucleic acid molecules to plant cells is microprojectile bombardment. This method has been reviewed by Yang and Christou (eds.), Particle Bombardment Technology for Gene Transfer, Oxford Press, Oxford, England (1994), the entirety of which is herein incorporated by reference). Non-biological particles (microprojectiles) that may be coated with nucleic acids and delivered into cells by a propelling force. Exemplary particles include those comprised of tungsten, gold, platinum, and the like.

[0262] A particular advantage of microprojectile bombardment, in addition to it being an effective means of reproducibly transforming monocots, is that neither the isolation of protoplasts (Cristou et al., Plant Physiol. 87:671-674 (1988), the entirety of which is herein incorporated by reference) nor the susceptibility of Agrobacterium infection are required. An illustrative embodiment of a method for delivering DNA into maize cells by acceleration is a biolistics α-particle delivery system, which can be used to propel particles coated with DNA through a screen, such as a stainless steel or Nytex screen, onto a filter surface covered with corn cells cultured in suspension. Gordon-Kamm et al., describes the basic procedure for coating tungsten particles with DNA (Gordon-Kamm et al., Plant Cell 2:603-618 (1990), the entirety of which is herein incorporated by reference). The screen disperses the tungsten nucleic acid particles so that they are not delivered to the recipient cells in large aggregates. A particle delivery system suitable for use with the present invention is the helium acceleration PDS-1000/He gun is available from Bio-Rad Laboratories (Bio-Rad, Hercules, Calif.)(Sanford et al., Technique 3:3-16 (1991), the entirety of which is herein incorporated by reference).

[0263] For the bombardment, cells in suspension may be concentrated on filters. Filters containing the cells to be bombarded are positioned at an appropriate distance below the microprojectile stopping plate. If desired, one or more screens are also positioned between the gun and the cells to be bombarded.

[0264] Alternatively, immature embryos or other target cells may be arranged on solid culture medium. The cells to be bombarded are positioned at an appropriate distance below the microprojectile stopping plate. If desired, one or more screens are also positioned between the acceleration device and the cells to be bombarded. Through the use of techniques set forth herein one may obtain up to 1000 or more foci of cells transiently expressing a marker gene. The number of cells in a focus which express the exogenous gene product 48 hours post-bombardment often range from one to ten and average one to three.

[0265] In bombardment transformation, one may optimize the pre-bombardment culturing conditions and the bombardment parameters to yield the maximum numbers of stable transformants. Both the physical and biological parameters for bombardment are important in this technology. Physical factors are those that involve manipulating the DNA/microprojectile precipitate or those that affect the flight and velocity of either the macro- or microprojectiles. Biological factors include all steps involved in manipulation of cells before and immediately after bombardment, the osmotic adjustment of target cells to help alleviate the trauma associated with bombardment, and also the nature of the transforming DNA, such as linearized DNA or intact supercoiled plasmids. It is believed that pre-bombardment manipulations are especially important for successful transformation of immature embryos.

[0266] In another alternative embodiment, plastids can be stably transformed. Methods disclosed for plastid transformation in higher plants include the particle gun delivery of DNA containing a selectable marker and targeting of the DNA to the plastid genome through homologous recombination (Svab et al., Proc. Natl. Acad. Sci. (U.S.A.) 87:8526-8530 (1990); Svab and Maliga, Proc. Natl. Acad. Sci. (U.S.A.) 90:913-917 (1993); Staub and Maliga, EMBO J. 12:601-606 (1993); U.S. Pat. Nos. 5, 451,513 and 5,545,818, all of which are herein incorporated by reference in their entirety).

[0267] Accordingly, it is contemplated that one may wish to adjust various aspects of the bombardment parameters in small scale studies to fully optimize the conditions. One may particularly wish to adjust physical parameters such as gap distance, flight distance, tissue distance, and helium pressure. One may also minimize the trauma reduction factors by modifying conditions which influence the physiological state of the recipient cells and which may therefore influence transformation and integration efficiencies. For example, the osmotic state, tissue hydration and the subculture stage or cell cycle of the recipient cells may be adjusted for optimum transformation. The execution of other routine adjustments will be known to those of skill in the art in light of the present disclosure.

[0268] Agrobacterium-mediated transfer is a widely applicable system for introducing genes into plant cells because the DNA can be introduced into whole plant tissues, thereby bypassing the need for regeneration of an intact plant from a protoplast. The use of Agrobacterium-mediated plant integrating vectors to introduce DNA into plant cells is well known in the art. See, for example the methods described by Fraley et al., Bio/Technology 3:629-635 (1985) and Rogers et al., Methods Enzymol. 153:253-277 (1987), both of which are herein incorporated by reference in their entirety. Further, the integration of the Ti-DNA is a relatively precise process resulting in few rearrangements. The region of DNA to be transferred is defined by the border sequences, and intervening DNA is usually inserted into the plant genome as described (Spielmann et al., Mol. Gen. Genet. 205:34 (1986), the entirety of which is herein incorporated by reference).

[0269] Modern Agrobacterium transformation vectors are capable of replication in E. coli as well as Agrobacterium, allowing for convenient manipulations as described (Klee et al., In: Plant DNA Infectious Agents, Hohn and Schell (eds.), Springer-Verlag, New York, pp. 179-203 (1985), the entirety of which is herein incorporated by reference. Moreover, technological advances in vectors for Agrobacterium-mediated gene transfer have improved the arrangement of genes and restriction sites in the vectors to facilitate construction of vectors capable of expressing various polypeptide coding genes. The vectors described have convenient multi-linker regions flanked by a promoter and a polyadenylation site for direct expression of inserted polypeptide coding genes and are suitable for present purposes (Rogers et al., Methods Enzymol. 153:253-277 (1987)). In addition, Agrobacterium containing both armed and disarmed Ti genes can be used for the transformations. In those plant strains where Agrobacterium-mediated transformation is efficient, it is the method of choice because of the facile and defined nature of the gene transfer.

[0270] A genetically improved plant formed using Agrobacterium transformation methods typically contains a single gene on one chromosome. Such genetically improved plants can be referred to as being heterozygous for the added gene. More preferred is a genetically improved plant that is homozygous for the added structural gene; i.e., a genetically improved plant that contains two added genes, one gene at the same locus on each chromosome of a chromosome pair. A homozygous genetically improved plant can be obtained by sexually mating (selfing) an independent segregant genetically improved plant that contains a single added gene, germinating some of the seed produced and analyzing the resulting plants produced for the gene of interest.

[0271] It is also to be understood that two different genetically improved plants can also be mated to produce offspring that contain two independently segregating added, exogenous genes. Selfing of appropriate progeny can produce plants that are homozygous for both added, exogenous genes that encode a polypeptide of interest. Back-crossing to a parental plant and out-crossing with a non-genetically improved plant are also contemplated, as is vegetative propagation.

[0272] Transformation of plant protoplasts can be achieved using methods based on calcium phosphate precipitation, polyethylene glycol treatment, electroporation, and combinations of these treatments (See, for example, Potrykus et al., Mol. Gen. Genet. 205:193-200 (1986); Lorz et al., Mol. Gen. Genet. 199:178 (1985); Fromm et al., Nature 319:791 (1986); Uchimiya et al., Mol. Gen. Genet. 204:204 (1986); Marcotte et al., Nature 335:454-457 (1988), all of which are herein incorporated by reference in their entirety).

[0273] Application of these systems to different plant strains depends upon the ability to regenerate that particular plant strain from protoplasts. Illustrative methods for the regeneration of cereals from protoplasts are described (Fujimura et al., Plant Tissue Culture Letters 2:74 (1985); Toriyama et al., Theor Appl. Genet. 205:34 (1986); Yamada et al., Plant Cell Rep. 4:85 (1986); Abdullah et al., Biotechnolog 4:1087 (1986), all of which are herein incorporated by reference in their entirety).

[0274] To transform plant strains that cannot be successfully regenerated from protoplasts, other ways to introduce DNA into intact cells or tissues can be utilized. For example, regeneration of cereals from immature embryos or explants can be effected as described (Vasil, Biotechnology 6:397 (1988), the entirety of which is herein incorporated by reference). In addition, “particle gun” or high-velocity microprojectile technology can be utilized (Vasil et al., Bio/Technology 10:667 (1992), the entirety of which is herein incorporated by reference).

[0275] Using the latter technology, DNA is carried through the cell wall and into the cytoplasm on the surface of small metal particles as described (Klein et al., Nature 328:70 (1987); Klein et al., Proc. Natl. Acad. Sci. (U.S.A.) 85:8502-8505 (1988); McCabe et al., Bio/Technology 6:923 (1988), all of which are herein incorporated by reference in their entirety). The metal particles penetrate through several layers of cells and thus allow the transformation of cells within tissue explants.

[0276] Other methods of cell transformation can also be used and include but are not limited to introduction of DNA into plants by direct DNA transfer into pollen (Zhou et al., Methods Enzymol. 101:433 (1983); Hess et al., Intern Rev. Cytol. 107:367 (1987); Luo et al., Plant Mol Biol. Reporter 6:165 (1988), all of which are herein incorporated by reference in their entirety), by direct injection of DNA into reproductive organs of a plant (Pena et al., Nature 325:274 (1987), the entirety of which is herein incorporated by reference), or by direct injection of DNA into the cells of immature embryos followed by the rehydration of desiccated embryos (Neuhaus et al., Theor. Appl. Genet. 75:30 (1987), the entirety of which is herein incorporated by reference).

[0277] The regeneration, development, and cultivation of plants from single plant protoplast transformants or from various transformed explants is well known in the art (Weissbach and Weissbach, In: Methods for Plant Molecular Biology, Academic Press, San Diego, Calif., (1988), the entirety of which is herein incorporated by reference). This regeneration and growth process typically includes the steps of selection of transformed cells, culturing those individualized cells through the usual stages of embryonic development through the rooted plantlet stage. Genetically improved embryos and seeds are similarly regenerated. The resulting genetically improved rooted shoots are thereafter planted in an appropriate plant growth medium such as soil.

[0278] The development or regeneration of plants containing the foreign, exogenous gene that encodes a protein of interest is well known in the art. Preferably, the regenerated plants are self-pollinated to provide homozygous genetically improved plants. Otherwise, pollen obtained from the regenerated plants is crossed to seed-grown plants of agronomically important lines. Conversely, pollen from plants of these important lines is used to pollinate regenerated plants. A genetically improved plant of the present invention containing a desired polypeptide is cultivated using methods well known to one skilled in the art.

[0279] There are a variety of methods for the regeneration of plants from plant tissue. The particular method of regeneration will depend on the starting plant tissue and the particular plant species to be regenerated.

[0280] Methods for transforming dicots, primarily by use of Agrobacterium tumefaciens, and obtaining genetically improved plants have been published for cotton (U.S. Pat. No. 5,004,863; U.S. Pat. No. 5,159,135; U.S. Pat. No. 5,518,908, all of which are herein incorporated by reference in their entirety); soybean (U.S. Pat. No. 5,569,834; U.S. Pat. No. 5,416,011; McCabe et. al., Biotechnology 6:923 (1988); Christou et al., Plant Physiol. 87:671-674 (1988); all of which are herein incorporated by reference in their entirety); Brassica (U.S. Pat. No. 5,463,174, the entirety of which is herein incorporated by reference); peanut (Cheng et al., Plant Cell Rep. 15:653-657 (1996), McKently et al., Plant Cell Rep. 14:699-703 (1995), all of which are herein incorporated by reference in their entirety); papaya; and pea (Grant et al., Plant Cell Rep. 15:254-258 (1995), the entirety of which is herein incorporated by reference).

[0281] Transformation of monocotyledons using electroporation, particle bombardment, and Agrobacterium have also been reported. Transformation and plant regeneration have been achieved in asparagus (Bytebier et al., Proc. Natl. Acad. Sci. (USA) 84:5354 (1987), the entirety of which is herein incorporated by reference); barley (Wan and Lemaux, Plant Physiol 104:37 (1994), the entirety of which is herein incorporated by reference); maize (Rhodes et al., Science 240:204 (1988); Gordon-Kamm et al., Plant Cell 2:603-618 (1990); Fromm et al., Bio/Technology 8:833 (1990); Koziel et al., Bio/Technology 11:194 (1993); Armstrong et al., Crop Science 35:550-557 (1995); all of which are herein incorporated by reference in their entirety); oat (Somers et al., Bio/Technology 10:1589 (1992), the entirety of which is herein incorporated by reference); orchard grass (Horn et al., Plant Cell Rep. 7:469 (1988), the entirety of which is herein incorporated by reference); rice (Toriyama et al., Theor. Appl. Genet. 205:34 (1986); Part et al., Plant Mol. Biol. 32:1135-1148 (1996); Abedinia et al., Aust. J. Plant Physiol. 24:133-141 (1997); Zhang and Wu, Theor. Appl. Genet. 76:835 (1988); Zhang et al., Plant Cell Rep. 7:379 (1988); Battraw and Hall, Plant Sci. 86:191-202 (1992); Christou et al., Bio/Technology 9:957 (1991), all of which are herein incorporated by reference in their entirety); rye (De la Pena et al., Nature 325:274 (1987), the entirety of which is herein incorporated by reference); sugarcane (Bower and Birch, Plant J. 2:409 (1992), the entirety of which is herein incorporated by reference); tall fescue (Wang et al., Biotechnology 10:691 (1992), the entirety of which is herein incorporated by reference), and wheat (Vasil et al., Bio/Technology 10:667 (1992), the entirety of which is herein incorporated by reference; U.S. Pat. No.5,631,152, the entirety of which is herein incorporated by reference.)

[0282] Assays for gene expression based on the transient expression of cloned nucleic acid constructs have been developed by introducing the nucleic acid molecules into plant cells by polyethylene glycol treatment, electroporation, or particle bombardment (Marcotte et al., Nature 335:454-457 (1988), the entirety of which is herein incorporated by reference; Marcotte et al., Plant Cell 1:523-532 (1989), the entirety of which is herein incorporated by reference; McCarty et al., Cell 66:895-905 (1991), the entirety of which is herein incorporated by reference; Hattori et al., Genes Dev. 6:609-618 (1992), the entirety of which is herein incorporated by reference; Goff et al., EMBO J. 9:2517-2522 (1990), the entirety of which is herein incorporated by reference). Transient expression systems may be used to functionally dissect gene constructs (see generally, Mailga et al., Methods in Plant Molecular Biology, Cold Spring Harbor Press (1995)).

[0283] Any of the nucleic acid molecules of the present invention may be introduced into a plant cell in a permanent or transient manner in combination with other genetic elements such as vectors, promoters, enhancers etc. Further, any of the nucleic acid molecules of the present invention may be introduced into a plant cell in a manner that allows for overexpression of the protein or fragment thereof encoded by the nucleic acid molecule.

[0284] (g) Computer Readable Media

[0285] The nucleotide sequence provided in SEQ ID NO: 1 through SEQ ID NO: 5,912 or fragment thereof, or complement thereof, or a nucleotide sequence at least 90% identical, preferably 95%, identical even more preferably 99% or 100% identical to the sequence provided in SEQ ID NO: 1 through SEQ ID NO: 5,912 or fragment thereof, or complement thereof, can be “provided” in a variety of mediums to facilitate use. Such a medium can also provide a subset thereof in a form that allows a skilled artisan to examine the sequences.

[0286] In one application of this embodiment, a nucleotide sequence of the present invention can be recorded on computer readable media. As used herein, “computer readable media” refers to any medium that can be read and accessed directly by a computer. Such media include, but are not limited to: magnetic storage media, such as floppy discs, hard disc, storage medium, and magnetic tape: optical storage media such as CD-ROM; electrical storage media such as RAM and ROM; and hybrids of these categories such as magnetic/optical storage media. A skilled artisan can readily appreciate how any of the presently known computer readable mediums can be used to create a manufacture comprising computer readable medium having recorded thereon a nucleotide sequence of the present invention.

[0287] As used herein, “recorded” refers to a process for storing information on computer readable medium. A skilled artisan can readily adopt any of the presently known methods for recording information on computer readable medium to generate media comprising the nucleotide sequence information of the present invention. A variety of data storage structures are available to a skilled artisan for creating a computer readable medium having recorded thereon a nucleotide sequence of the present invention. The choice of the data storage structure will generally be based on the means chosen to access the stored information. In addition, a variety of data processor programs and formats can be used to store the nucleotide sequence information of the present invention on computer readable medium. The sequence information can be represented in a word processing text file, formatted in commercially-available software such as WordPerfect and Microsoft Word, or represented in the form of an ASCII file, stored in a database application, such as DB2, Sybase, Oracle, or the like. A skilled artisan can readily adapt any number of data processor structuring formats (e.g. text file or database) in order to obtain computer readable medium having recorded thereon the nucleotide sequence information of the present invention.

[0288] By providing one or more of nucleotide sequences of the present invention, a skilled artisan can routinely access the sequence information for a variety of purposes. Computer software is publicly available which allows a skilled artisan to access sequence information provided in a computer readable medium. The examples which follow demonstrate how software which implements the BLAST (Altschul et al., J. Mol. Biol. 215:403-410 (1990), the entirety of which is herein incorporated by reference) and BLAZE (Brutlag et al., Comp. Chem. 17:203-207 (1993), the entirety of which is herein incorporated by reference) search algorithms on a Sybase system can be used to identify open reading frames (ORFs) within the genome that contain homology to ORFs or proteins from other organisms. Such ORFs are protein-encoding fragments within the sequences of the present invention and are useful in producing commercially important proteins such as enzymes used in amino acid biosynthesis, metabolism, transcription, translation, RNA processing, nucleic acid and a protein degradation, protein modification, and DNA replication, restriction, modification, recombination, and repair.

[0289] The present invention further provides systems, particularly computer-based systems, which contain the sequence information described herein. Such systems are designed to identify commercially important fragments of the nucleic acid molecule of the present invention. As used herein, “a computer-based system” refers to the hardware means, software means, and data storage means used to analyze the nucleotide sequence information of the present invention. The minimum hardware means of the computer-based systems of the present invention comprises a central processing unit (CPU), input means, output means, and data storage means. A skilled artisan can readily appreciate that any one of the currently available computer-based system are suitable for use in the present invention.

[0290] As indicated above, the computer-based systems of the present invention comprise a data storage means having stored therein a nucleotide sequence of the present invention and the necessary hardware means and software means for supporting and implementing a search means. As used herein, “data storage means” refers to memory that can store nucleotide sequence information of the present invention, or a memory access means which can access manufactures having recorded thereon the nucleotide sequence information of the present invention. As used herein, “search means” refers to one or more programs which are implemented on the computer-based system to compare a target sequence or target structural motif with the sequence information stored within the data storage means. Search means are used to identify fragments or regions of the sequence of the present invention that match a particular target sequence or target motif. A variety of known algorithms are disclosed publicly and a variety of commercially available software for conducting search means are available can be used in the computer-based systems of the present invention. Examples of such software include, but are not limited to, MacPattern (EMBL), BLASTIN and BLASTIX (NCBIA). One of the available algorithms or implementing software packages for conducting homology searches can be adapted for use in the present computer-based systems.

[0291] The most preferred sequence length of a target sequence is from about 10 to 100 amino acids or from about 30 to 300 nucleotide residues. However, it is well recognized that during searches for commercially important fragments of the nucleic acid molecules of the present invention, such as sequence fragments involved in gene expression and protein processing, may be of shorter length.

[0292] As used herein, “a target structural motif,” or “target motif,” refers to any rationally selected sequence or combination of sequences in which the sequences the sequence(s) are chosen based on a three-dimensional configuration which is formed upon the folding of the target motif. There are a variety of target motifs known in the art. Protein target motifs include, but are not limited to, enzymatic active sites and signal sequences. Nucleic acid target motifs include, but are not limited to, promoter sequences, cis elements, hairpin structures and inducible expression elements (protein binding sequences).

[0293] Thus, the present invention further provides an input means for receiving a target sequence, a data storage means for storing the target sequences of the present invention sequence identified using a search means as described above, and an output means for outputting the identified homologous sequences. A variety of structural formats for the input and output means can be used to input and output information in the computer-based systems of the present invention. A preferred format for an output means ranks fragments of the sequence of the present invention by varying degrees of homology to the target sequence or target motif. Such presentation provides a skilled artisan with a ranking of sequences which contain various amounts of the target sequence or target motif and identifies the degree of homology contained in the identified fragment.

[0294] A variety of comparing means can be used to compare a target sequence or target motif with the data storage means to identify sequence fragments sequence of the present invention. For example, implementing software which implement the BLAST and BLAZE algorithms (Altschul et al., J. Mol. Biol. 215:403-410 (1990)) can be used to identify open frames within the nucleic acid molecules of the present invention. A skilled artisan can readily recognize that any one of the publicly available homology search programs can be used as the search means for the computer-based systems of the present invention.

[0295] Having now generally described the invention, the same will be more readily understood through reference to the following examples which are provided by way of illustration, and are not intended to be limiting of the present invention, unless specified.

### EXAMPLE 1

[0296] The LIB13, LIB34, LIB3057, LIB3058, LIB188 and LIB2809 cDNA libraries are generated from Bos taurus muscle, liver, pituitary gland, brain, dry mammary gland and lactating mammary gland tissue respectively. Total RNA is obtained from each of the tissue types. Ten ml of TRIzol reagent (Life Technologies, Gaithersburg, Md U.S.A.) is used to homogenize 1 g of tissue, followed by centrifugation to remove the tissue homogenate. The polyA+ selected MRNA for the LIB13, LIB34, LIB3057 and LIB3058 libraries is prepared using standard protocol provided by the manufacturer (Life Technologies, Gaithersburg, Md. U.S.A.). The protocol yields, on average, 1 mg of total RNA per gram of tissue. One mg of total RNA is used in the polyA+ selection procedure. Mini-oligo dT cellulose spin columns (Pharmacia Biotech, Kalamazoo, Mich. U.S.A.) are used to isolate the poly A+ mRNA. The standard kit protocol specified by the manufacturer is followed, except poly A+ mRNA is twice selected by repeat passage on the oligo dT cellulose column. Yields range from 6.44 μg polyA+ to 34 μg polyA+ for all tissues.

[0297] The LIB13, LIB34, LIB3057 and LIB3058 cDNA libraries are constructed from the polyA+ mRNA using SuperScript Plasmid System for cDNA synthesis and plasmid cloning (Life Technologies). For each library 4.0 kg of polyA+ is used. The library is prepared essentially according to the manufacturer's protocol. The resulting cDNA is size fractionated on a 0.8% agarose gel in the 1.5-8 kb range. The collection of cloned cDNAs is collectively referred to as a library. The library is transformed into E. coli and individual colonies are randomly selected for sequencing. For the LIB188 and LIB2809 libraries a subtraction library approach is used. Total mammary gland RNA is used to create subtraction libraries according to the manufacturers recommendations (Clontech, Palo Alto, Calif. U.S.A.).

### EXAMPLE 2

[0298] The resulting libraries are submitted for high throughput EST sequencing. Plasmid DNA is prepared from selected colonies and the inserts are sequenced using standard high throughput DNA sequencing methodologies. Two basic methods can be used for DNA sequencing, the chain termination method of Sanger et al., Proc. Natl. Acad. Sci. (U.S.A.) 74:5463-5467 (1977), the entirety of which is herein incorporated by reference and the chemical degradation method of Maxam and Gilbert, Proc. Natl. Acad. Sci. (U.S.A.) 74:560-564 (1977), the entirety of which is herein incorporated by reference. Automation and advances in technology such as the replacement of radioisotopes with fluorescence-based sequencing have reduced the effort required to sequence DNA (Craxton, Method, 2:20-26 (1991), the entirety of which is herein incorporated by reference; Ju et al., Proc. Natl. Acad. Sci. (U.S.A.) 92:4347-4351 (1995), the entirety of which is herein incorporated by reference; Tabor and Richardson, Proc. Natl. Acad. Sci. (U.S.A.) 92:6339-6343 (1995), the entirety of which is herein incorporated by reference). Automated sequencers are available from, for example, Pharmacia Biotech, Inc., Piscataway, N.J. (Pharmacia ALF), LI-COR, Inc., Lincoln, Neb. (LI-COR 4,000) and Millipore, Bedford, Mass. (Millipore BaseStation).

[0299] In addition, advances in capillary gel electrophoresis have also reduced the effort required to sequence DNA and such advances provide a rapid high resolution approach for sequencing DNA samples (Swerdlow and Gesteland, Nucleic Acids Res. 18:1415-1419 (1990); Smith, Nature 349:812-813 (1991); Luckey et al., Methods Enzymol. 218:154-172 (1993); Lu et al., J. Chromatog. A. 680:497-501 (1994); Carson et al., Anal. Chem. 65:3219-3226 (1993); Huang et al., Anal. Chem. 64:2149-2154 (1992); Kheterpal et al., Electrophoresis 17:1852-1859 (1996); Quesada and Zhang, Electrophoresis 17:1841-1851 (1996); Baba, Yakugaku Zasshi 117:265-281 (1997), all of which are herein incorporated by reference in their entirety).

[0300] A number of sequencing techniques are known in the art, including fluorescence-based sequencing methodologies. These methods have the detection, automation and instrumentation capability necessary for the analysis of large volumes of sequence data. Currently, the 377 DNA Sequencer (Perkin-Elmer Corp., Applied Biosystems Div., Foster City, Calif.) allows the most rapid electrophoresis and data collection. With these types of automated systems, fluorescent dye-labeled sequence reaction products are detected and data entered directly into the computer, producing a chromatogram that is subsequently viewed, stored, and analyzed using the corresponding software programs. These methods are known to those of skill in the art and have been described and reviewed (Birren et al., Genome Analysis: Analyzing DNA,1, Cold Spring Harbor, N.Y., the entirety of which is herein incorporated by reference).

[0301] Sequences are processed by Block I analysis generating usable EST sequences. The usable ESTs comprise short nucleotide sequences, 50-350 nucleotides in length which represent partial sequences of genes expressed in these tissues. The ESTs are compared to nonredundant amino acid and nucleic acid databases.

We claim:

1. A substantially purified nucleic acid molecule, said nucleic acid molecule capable of specifically hybridizing to a second nucleic acid molecule, said second nucleic acid having a nucleic acid sequence selected from the group consisting of SEQ ID NO: 1 through SEQ ID NO: 5,912 or complements thereof.

2. The substantially purified nucleic acid molecule according to claim 1, said nucleic acid molecule having a nucleic acid sequence selected from the group consisting of SEQ ID NO: 1 through SEQ ID NO: 5,912 or complements thereof of fragments of either.

3. A transformed cell having a nucleic acid molecule which comprises:
(A) an exogenous promoter region which functions in said cell to cause the production of a mRNA molecule; which is linked to
(B) a structural nucleic acid molecule encoding a bovine protein or fragment thereof, said structural nucleic acid molecule capable of specifically hybridizing to a second nucleic acid molecule, said second nucleic acid molecule having a nucleic acid sequence selected from the group consisting of a complement of SEQ ID NO: 1 through SEQ ID NO: 5,912; which is linked to
(C) a 3′ non-translated sequence that functions in said cell to cause termination of transcription and addition of polyadenylated ribonucleotides to a 3′ end of said mRNA molecule.

4. The transformed cell having a nucleic acid molecule according to claim 3, wherein said bovine protein or fragment thereof is encoded by a nucleic acid sequence selected from the group consisting of SEQ ID NO: 1 through SEQ ID NO: 5,912 or fragment thereof.

5. The transformed cell according to claim 4, wherein said cell is selected from the group consisting of a plant cell, a mammalian cell, a bacterial cell, an insect cell and a fungal cell.

6. The transformed cell according to claim 4, wherein said cell is a bovine cell.

7. A method for determining a level or pattern of a molecule in a bovine cell or tissue comprising:
(A) incubating, under conditions permitting nucleic acid hybridization, a marker nucleic acid molecule, said marker nucleic acid molecule comprising a nucleic acid sequence selected from the group consisting of SEQ ID NO: 1 through SEQ ID NO: 5,912 or complements thereof or fragment of either, with a complementary nucleic acid molecule obtained from said bovine cell or tissue, wherein nucleic acid hybridization between said marker nucleic acid molecule and said complementary nucleic acid molecule obtained from said bovine cell or tissue permits the detection of said molecule;
(B) permitting hybridization between said marker nucleic acid molecule and said complementary nucleic acid molecule obtained from said bovine cell or tissue; and
(C) detecting the level or pattern of said complementary nucleic acid, wherein the detection of said complementary nucleic acid is predictive of the level or pattern of molecule.

8. The method of claim 7, wherein said level is predictive of said molecule.

9. The method of claim 7, wherein said pattern is predictive of said molecule.

10. The method of claim 7, wherein said molecule is an mRNA molecule.

11. The method of claim 10, wherein said level or pattern is detected by in situ hybridization.

12. The method of claim 10, wherein said level or pattern is detected by tissue printing.

The application's sequence listing, which the Patent Office published only in electronic form, follows.

SEQUENCE LISTING (5912 sequences)

SEQ ID NO: 1 - DNA, 419 bp, Bos taurus
  unsure (343),(378): unsure at all n locations; Clone ID: 01-BOVMS1-003-Q1-E1-A1
aaaatggaagttggaacaatggttaacctgaaaaagttccccagttgtaacaattttgatttttcctttcctgtgaccttccctgttgtcttgaaccatagcaaaaggatactgcatctcttgttgtattgctgaggttattgaagttacataaaacacatctcagtctctgtttcttggaaggaaagtcctgctagttgactgacaattctaagcagggagaattaagataaatgtgtttaattaatgttttgcacacaaatgcagaatttgtataaccacatgacatcatagttgtgatctcaaaaaaaggactttatctttttcttgcagttaaatgtangaattctctgaaactctaagcttctgaagtgttanaggtagagatggtctagcaaagatgtagtttgtaatgtttt

SEQ ID NO: 2 - DNA, 434 bp, Bos taurus
  Clone ID: 01-BOVMS1-005-Q1-E1-A1
tatgatgacattccagactttgatgactagcacccaccccagcactgaagaaaagagtcacagatggaactaagcccagctttaagacattgagcaaaaactatgactaaggactaaggagttctgcagtttgccaatgtttaacaaaacagtggacagattttatgggtccatcctgaaagatgttaactaagctcacaagtaactgtcatttgggcattctcttatttttcattttctggccctggcaaaaagctcctgacaaagtttttctgaatgaatatgcatcatgggagagtagcaattaattgtatgggaaagtgggaggttattctgtagtggaaagtgttctgccaccacccctttttagagttgagcattcttttaaatagtcctcatggtcagaatgttcttatggcaaaatggaagaatgc

SEQ ID NO: 3 - DNA, 293 bp, Bos taurus
  Clone ID: 01-BOVMS1-006-Q1-E1-A1
tcggcaacagggtcggccgcgcgtccgatctaaccaacatgtttcacgtttctatgagagacgtggcatgtatttgaaatcgcagattgtcattgcacaacgggtacgatcacaatccacagtgcatatgcatctcagtaaacatcttttgaccaagatgtgagaaactagcaccttacatcattaccaagtatgaaatttggcctggattgagaaatacgagcgattcatgctctaagagatcattttagaggactgttcatcgatacagacacttctccttatagactttt

SEQ ID NO: 4 - DNA, 291 bp, Bos taurus
  Clone ID: 01-BOVMS1-007-Q1-E1-A1
cgggtcgacccactcatcaggcaaaagtcacgctaatggagtgatacatttataaatggtaagtgcatccctggtggcgtcgtgcctatcactctgcattcccactgcagggggcctatgatccttccctgatcggggaaatacatcctgcatgctgcatctacactttgcatgacataaccatttacccagcatgattaaatgcaaattctgcacctgccactaactaatacctgcagcatgccaaatatatgtgttaattaattaacttacatttaacaatggttattc

SEQ ID NO: 5 - DNA, 310 bp, Bos taurus
  Clone ID: 01-BOVMS1-013-Q1-E1-A9
cgacaccttttctctaccaaaacgcagaatacatcaacaactcgatgacgtgttgggggtatttttccagtatggaagccagtttggggtggggtaatttaataacactgtggtttggaaatctgttttaatacaagccaataagcacctatgcattcttatagatccttaaatcttaaagtggattatttttaaaatgtttagcctgaaattagtttcacatgttctttatattcctgatgttttcttaaatttaggtcaaaatctcgcaagtccacatgacttttccatttctgttagaattgaatca

SEQ ID NO: 6 - DNA, 451 bp, Bos taurus
  Clone ID: 01-BOVMS1-014-Q1-E1-A1
gagatttaaacttttaagtgaacctatctgctagaaggaaattgggaagaatttaatgatcagggtaatctattattgttttccacatgtagaaaacaataatagattaccctgatcattattgttttctacatgtggaaactttctgtcttggatattttatcttttttttttttttttatctcagtgttcacatttttctggaagaaaccactgtgcacaaaacaaattttaattctgaatatttcaaagaattgtgaagatgagaagttttaatgttttataatcacctatgaaatgttctctttgtatttctgtttataagtaaattttgtattgattaaataaaacatttgacttgaaatgaggaacagtaaatgaaaggtacatctgatttctaactcttattcagactttggtaccagttccccaaggcacacagtggggtgac

SEQ ID NO: 7 - DNA, 177 bp, Bos taurus
  Clone ID: 01-BOVMS1-015-Q1-E1-A9
aaaaaaaaaacaaaaacttcaataaacaaaaaaaaaaataaaaagaaggacggattaaataaatatcctcatcaaaaacagccttccgcttctttgtgcttacaccttaactatccgggggttccaattcattgaccttccaatttaaccgcgtattctcaagttaccggtgtccct

SEQ ID NO: 8 - DNA, 148 bp, Bos taurus
  Clone ID: 01-BOVMS1-021-Q1-E1-A1
aaaaaaaaaagttctggaaaaagctgtgaataatttcacattgtcaagtcagtgaattgaattagttcatacccaaatttagtcgtcattctccaatacgtgtacatacaatttaaattaaaattcgggcagtgtccataaaggtcta

SEQ ID NO: 9 - DNA, 339 bp, Bos taurus
  Clone ID: 01-BOVMS1-021-Q1-E1-A9
gtgattttgaacaagaatgcctagcagttcatctctactaatgtggttgatgagaaaaccatacgacagtgtttaatatttttagaagcattgtgtgatacccttcacaacttcagttatcacacaataaggtatacagacataggacctacttaacgaataaattgaagaacgcttttgaaatatatttctctttgggtacaagaccaacacacaccagacattgttaatttaactgaacatgtgccttgacgtgtttaaacactgcatacaattttcttctgactaacacatgcatacttcctcatgacatatccaggcataaatgcctctaatcac

SEQ ID NO: 10 - DNA, 248 bp, Bos taurus
  Clone ID: 02-BOVMS1-001-Q1-E1-A5
gacccacgcatccgagccgagggcactctgaaggtgccatgctcacagccctctgcatgcatcgccttacctcatcgagtgcatcgggataatccagttcacttgccctagctttttaaggttgttgatctgacacacctggttctcgtggccattggcaactagctgcacacttcccgctcggcacacggggatataacggactagcacgcatcagtctccattcttaccaattgttcaaacttaat

SEQ ID NO: 11 - DNA, 86 bp, Bos taurus
  Clone ID: 02-BOVMS1-014-Q1-E1-A9
tgagggtgcaactgaagctcccagtcccggagcctggagagctgcccctttggaagaagcagaataaagcaattttccttgaagtg

SEQ ID NO: 12 - DNA, 377 bp, Bos taurus
  Clone ID: 02-BOVMS1-016-Q1-E1-A5
tcatcagtccacgcgtccttcaaaatgcttcaaagcttaattaaacccaatttggaccccaaaaatcattaaaaattataaatcagattaaaaaaagtgagacaaaaataaaaaagataaataaatgaaaagtaattagtaaaaaaaaaaggggtgcccccctaaatggttcaagcttaacttccccttaatataaatttcaaaattctccaaaatgtcccctaaatttaatttaatggtcgttcttttaaaaattcctgactgtgaaaatccttgatttaccaaaattaacacccttgaagaaaaatacccttttcgtaacttgggttataccctaaaagccccaattgtttgaccttcccaaaaatttgtcaacc

SEQ ID NO: 13 - DNA, 320 bp, Bos taurus
  Clone ID: 02-BOVMS1-017-Q1-E1-A5
tgtgcaaaaaaagcgagcaggctcccctccaaaataaaactgaagaaagatactaaataaaaaaaacaaaccttacccaaaaacttcactttccatattaaacaatccaattaacaacaaaaggtggtgccataatccaactacaagggcatccacaaaacaagctcaaaaaggggcggcaccccaatcggttcaagttttattttaccacgtttgaaccgtaaaacaccttcaagggcgtcctataagcccttttaacgggtctcccttttaaactaccaggtactagaaaaacccgggccttaacccaatattccccc

SEQ ID NO: 14 - DNA, 393 bp, Bos taurus
  unsure (375): Clone ID: 02-BOVMS1-018-Q1-E1-A5
cagcatcagagtcttttccaaggagtcaactcttcgcatgcaaagtgagggagaggaagaggtaaaaagagactgcagtgcgtgtattgagaggcaccatagacaggggtaaatcgatatgttcttgaaaagacctctttacttctttttgtgagaagttcacactgtcttttctttgtttctctgaggtttggaaggtggggttttgttttcatcagtcatcaaatagtagatgtaaaagtcaaagacctgacctaagaattacaaaactcagaaatattgcattgatactgaggcactgaactttcacaattgttctctgagtgcctgccacattccaaatacttctggacactgaggatgtgcagtgaacanaggagataaaactgcctg

SEQ ID NO: 15 - DNA, 443 bp, Bos taurus
  Clone ID: 02-BOVMS1-018-Q1-E1-A9
ggagcacagagtgctgtgggcagatggtctcgtcagtcactgcggctgatgtatggagaagggatctagagaatgagaccggggcagtccttaggagatctgaaacagagaagtcaagtgagaacagaaattgacagctgagagctcctcagtaattaaacgttttaactcggcagttgattagctgtgggagagaggtcgatcctgagcgatgctagtttagccacctgaaatctctggtggttctgtttatatggtgagaaaaaccagaaggggaggaacaacctgtgctcgaaggaagatggaggtggtctctgaagatggctgtttgggtttggaagcatgcttttgttattttctgtcaggctggtcagtaaatatttactgagtatatactatgccttacaaccttaggcaaagacaagccatctaagcctcagtgt

SEQ ID NO: 16 - DNA, 61 bp, Bos taurus
  Clone ID: 02-BOVMS1-020-Q1-E1-A5
aaaaaaatcaaacaaaacaaaaaaaaaaataaacaaaaaaaaaaaaaaaaaaaaaaaaaaa

SEQ ID NO: 17 - DNA, 369 bp, Bos taurus
  Clone ID: 02-BOVMS1-020-Q1-E1-A9
atctacatcacgagcggacgcccttttttttttttttttttttttttttagtacagattattttatgtggcaaatgaaagaataaccttaaaggatttttttttcagatgtaatataattgcctgctttaccaactaaggtgatagagtgatatcaacagaggtagaaaatggagtttgcgctcaatctcacagattacaaattagttaaagctcataaaggcaaatagggagcatgaacaaactgagagagacattgacggaagcaagactctaacaccaacttataagatgcaacatggccaccagtgaaccgaacgaacagcctcttgagactccacgctgcctcaacggcaggagacagaactgg

SEQ ID NO: 18 - DNA, 435 bp, Bos taurus
  Clone ID: 02-BOVMS1-022-Q1-E1-A5
ctaccttgggacctggaattactatttttaaaattttaagttttcacaagataaagtttaataagtggacttttgctatgttatgtagctttgctctaaattaggggaacagatgcttgataactgaattttttttctgtgttgatttttaatctgtaaaggcacaacttaatggaaattcctaaagagttggtataaaagcaagctttggacagtcccagggaacaccacctgctttacatgctttgtatatcaggaaataagggacaggtattgaagagtatttatttactaaacacatttttcaaaatgtgaggtgtgagtgccttcagatctgtttttttcattttcagactgatcttgggaatggagtgttttgtggtggttgagagaatggcttaacaaaatcagaaatgcttccctcgggaaatgttt

SEQ ID NO: 19 - DNA, 444 bp, Bos taurus
  unsure (428): Clone ID: 03-BOVMS1-003-Q1-E1-A3
caaacaatataatttttgtttgagaaaaaaagaaatctgccattttaattaatattgatcagagtctaatgactatttatcttatatcgtagatttgataaccctatcaaaaaaaattacattctaagtgtaatcttacatagtgcttgtattgttgcatttgttttaacttgtggaaaagtattgtatctaacttgtatttctttggtagtttcatctttatgtattagtgatatttgtaattttctcaaccttaacaatgtagttatgctacaacttgcctaaaacattcaaacttattttcttttttctttttttctttgttaattcacttaaactcattgaaaacgtagtatacattactaaaacataaattatgggaatcaccgaaaatattttgtaatagactaattgttgttacattgtcnttcctttttttccttt

SEQ ID NO: 20 - DNA, 422 bp, Bos taurus
  Clone ID: 03-BOVMS1-007-Q1-E1-A11
gtccgcttaaattactcttcacttgttgtcccacaaagtcacatttggtggtggtcagccaagtcccatctggtctagttttatccttgtcccaattcttaagaaaaatgggaacaagtttgccctggtgagacccacaccattgcaatgattatcttgagcacttaaattccagtgttggctgttgatgtatttgatattctgcttgtctccccatggttgaaatatgtctgaagaatagcagcataatctcttggctgtttatacttttttaaactttcctgtgttgtaaatattgtatacttttggtgattccagctatgtaacctctatgctctgtaaggtgattatttgtatatagcaacatggcccagtgatattatataggttcccaatggagaggttattgagtgacctttgca

SEQ ID NO: 21 - DNA, 280 bp, Bos taurus
  Clone ID: 03-BOVMS1-013-Q1-E1-A11
ggaattcatgtcgtctccgtagacgattcatcatggaagtgatgacctgttcgagttgtgagaagttaatagtgaacctcgtgtcacttgcgtgagaagacatggtgtcttagtctgcactttgtggcggtcagctttgctgggactgcttgacgagctgttctgcaatctgcacacgtatccctctggttcctgggatgtatctcctgtgatcagtacttttttggcgtagcagggccagggggctccttttcaacagtctcgcacacaatgaatgcat

SEQ ID NO: 22 - DNA, 324 bp, Bos taurus
  Clone ID: 03-BOVMS1-017-Q1-E1-A3
tcatcaggccgaggccgctcaaaacgatgcctcctgacgtacgcatacatcacaattcataacacttctggcgagtcaacaatgttcacatcactggccttcgtattcagatgaccatgagtggtgaagaacctgacatggtggaccgtatacgccgagtttaaggactgcctttcgctatgaggctgctacagtaagtagccctcatcgatcgatctacgaaggactgtgctctcatacacagacacagtcatacgctttgctacatgacacacatcgccgaagctgtcgagcttactcatatgttgatagctacacttgcca

SEQ ID NO: 23 - DNA, 389 bp, Bos taurus
  Clone ID: 03-BOVMS1-022-Q1-E1-A3
gggtcgaccaacgcgtctgcaccccctttttatttgttattatatttttatttttttattttttcatattattttttttattattttttttttgctatgttatgtttctttgctctaatttatgggaatatttgcttgattaactgatattttttttctgtgttgatttttatctgtataggcaaaacatagtggaaattcctaaagaagtgggaaaggggaagctttggacaatcacagggaaaaccacctgctttacatactttgtatagcaggagataagggacacgtattgaacagtatggagttactaaagacatttttcagaatgtgacgtgtgagtgccatcagatcggggattttcatttacagactgatcatgggaatgg

SEQ ID NO: 24 - DNA, 107 bp, Bos taurus
  Clone ID: 04-BOVMS1-002-Q1-E1-A7
aggcctctccgtgagcaaagcttctcgctcgctcggtttgaccactgtaagtgcctgcactctgtaccctattaataaactacaataaagggaagacgcttctggtg

SEQ ID NO: 25 - DNA, 172 bp, Bos taurus
  Clone ID: 04-BOVMS1-004-Q1-E1-A7
tcgctcttgttgttttttgcttacctgctcgtacgtttttcgtcctttgcttctattgatgtctttcttttttgttcactcttgttcttttctgtctttctctctggggtgtctctgtctattcttttgttttattttgggtgttgcttctttctttctattggtttcttta

SEQ ID NO: 26 - DNA, 68 bp, Bos taurus
  Clone ID: 04-BOVMS1-010-Q1-E1-A11
gttaagcaactataataatgatttagtgctttggaaaggaaaaaaagttaaacttgaaatatgtaact

SEQ ID NO: 27 - DNA, 428 bp, Bos taurus
  Clone ID: 04-BOVMS1-012-Q1-E1-A7
cttgttatgacacgtccttgtcctgctttgcttttgagtttttttacacaacatgcagaggcactgaagtggccagatcattttcacgtgtcaagaatgtagacagtgtttcagtaccaaagtttaagaaaaagcaaattaaaatcgtgaattattttataggtgatatatttagattctcctcagctttgaaactgtttagcacagttccattgtgttacgtaagaagatgctttacccaacaagactggctgagcattgaaaggctttatgtcccagctgacttaaccagccatattcagccaggagggctgtgctccggctccgggtatcttgaagcccgtgactaaccttgtgcagccactagattttggcaggtgtttgtagagagacctagagggcacctgaaatatattggtaagggtttt

SEQ ID NO: 28 - DNA, 140 bp, Bos taurus
  Clone ID: 04-BOVMS1-017-Q1-E1-A11
gaagatgtttaatttgggattgaaggtatgctgttagctaatactgttaagtgtactgttactggacactgactgcttttatgactaatctatgaaatgtatttactgaatttgaagattaaatccacttgtaagagtat

SEQ ID NO: 29 - DNA, 385 bp, Bos taurus
  Clone ID: 04-BOVMS1-020-Q1-E1-A11
gcacatccgtttagggttttattttgctaaaaagaattcacacaggccaaaaacaaaaaaccatgcaaaacatttttgtgcacactttttaccacactatattccatttctgaaatgttaaaattaaaaatcccaaagcaagagtacttaggttgaaaagttaacattataaaagctagattcctaacaaaacacactgcagacataaatcactcagttgcaaaaagttaatgtttataaatgttaaataaatgtcaagaatgaggagacaagaactgtagatccaaagtgtactcctcaccatgaactattaaaacttgtgttcggtgttgtaggacatccatgatgttaactggaagtagctacaaccttaacccaacactat

SEQ ID NO: 30 - DNA, 423 bp, Bos taurus
  Clone ID: 04-BOVMS1-020-Q1-E1-A7
caggaattaagtttgtcagagttagctttttactatttttattcctaacaagtatgttaagaggcattcctacttttttccttttgtggtttaaaaaaagacagtaggtagagtataccactgttgtatatatgctaaaagtgggtgaattctagtggaataatttctaacatccgcagacttgttttgcaatggcaaatatttttagaacaccagttttaaatattgctgttgtatcaaacccaactctgattgttttccaacaaggcatctgaagttgttaaagagcaaaaaggttatccatatagtaagcgtattaattttaatgccactaacagaattcaaaaagacttaattggaagacagatctgtcagggcccattattccaggaggctactcaagtgaaatttttacagaagaga

SEQ ID NO: 31 - DNA, 406 bp, Bos taurus
  Clone ID: 05-BOVMS1-001-Q1-E1-B1
aatggaaagaaaatcctgaaggaggaaaacctgccggcaaaaaaatgaagacccgaatggtgtgcaaaatggtttgcaaattaacctaaaccaattcaacaggcaaaggattagttacctgctaagaaatttaaggacatcatacattatgaatcaacaagggatgaccatgcaccttacggaagaaagcaggatgaataaccaaaagacagtaaagcacaacgaaagaagaaaaggaagaagctgagaaactacctgaggtgtctaaagaaatgtattataacattgctacggatttgaaacaaatattcaaaagtgtaaaagatactagtgaaaaggaagataacacaccttggaatgaggactctgaaggagagaaagctgaggtaatccaagacactccaac

SEQ ID NO: 32 - DNA, 420 bp, Bos taurus
  Clone ID: 05-BOVMS1-005-Q1-E1-B1
cacaattgcactaagccttacaatacctctatccataatagctgacatgtgtatgcaaaaggtgcagttttcttggttattttttgcaggcgctatccctgtatttttttcattttttattgcaactctcctgtgccattacaataattgggatcctgtgatggtgggaatcagaagaatttttgcctttatatgcagaaaacatcgaattcagaaggttccagaagacagtgaacagtgtgagagtctcattcctatgcacggtgtttctcaggaggatggcgctagttagctatattccagcttgatgatggagtagtatacagcgaagagacaatctctggcaagtttttgtagaaaaatgtttcagtgcctagtctgaaaaataacagtttcagttctttggaactctaaaacata

SEQ ID NO: 33 - DNA, 406 bp, Bos taurus
  unsure (350): Clone ID: 05-BOVMS1-005-Q1-E1-B9
ggtcggcccacccgtccgggctcagcaagaacagcctctatctggaacattgctggatctagtggcagaagaaaaatggagaatgtggcaaaccatgtgctgactctgcacatttcagcctgagattgacacacatcaatttcatcaatatttgaccaaccaaaagtcaaactgatgcactgcaaagcacaccagacgcgtactatgaacgggacgcacactcgagtgatttactctggatcctgctctgcttctagggatggctgaggtgcgaatgttccacaggaaccaacacatgagacctgcttgcttatctggtcctcaggcctgtcaggacactgggagagtcnccttcccaccatgcgcatagcattacacagcgccaagttcatataagatattacac

SEQ ID NO: 34 - DNA, 234 bp, Bos taurus
  unsure (12): Clone ID: 05-BOVMS1-006-Q1-E1-B1
cgcgtccgcggntaccaaccgtgagctgcaagtgtgggcacttctcagtctccggagggccacaaatgtacatactgtgcatcggattcgagtgcggtcaccctgtggagacacatctcagatgtacattgtcgcagccacaataaattctatttcacaaaaattggccctgatgcctgcttctcgggtaaagtgaacaactccagcctgataggattaagatatacacaaaaa

SEQ ID NO: 35 - DNA, 408 bp, Bos taurus
  Clone ID: 05-BOVMS1-008-Q1-E1-B1
gtccgcataacccaacttcacagaacatgaacactgactccacctctttctatgaagaggatcagttacattgtaagagcctgtgggactggttatgtatgaatagtatatgtgtgtgtgtgtgtgtgtggccagtcaaaggtggactgtggatttatggtatgtggttcatccaaacttcatcatgagatggatttccactgcaatccctgtgggattcaggtttttattttcaagagaggcaacatgttttatttgtggatattgacataaagtgtgctgtgttcaagctgtcaagaattacctgctatttatagttcagagatacttcacagctagtactaaggtaaaaccatttcatcaaaattcaattaaaatgaccacttagaatatgaatttccactttat

SEQ ID NO: 36 - DNA, 321 bp, Bos taurus
  unsure (274): Clone ID: 05-BOVMS1-011-Q1-E1-B9
cccacgcgtccggtcaatagcaatagttatgatgggggacaagtcaaaagctgctatttttatagctctccaggcagaatttctcctttttttgccttttagttttactatctgataaagagaaggtgttagagggaggagttggtaggaaaggactaattctcaccaacagtagaggtaagttctttaactgcagaacctttacatacttcaggtggattcattttgtgtagcaagaattcttgatgtttctgcccgctctcagtgagtgtcnccactgtgattggatggggcattgccacacctcccttcatgtctatg

SEQ ID NO: 37 - DNA, 434 bp, Bos taurus
  Clone ID: 05-BOVMS1-012-Q1-E1-B1
aaatcaaatatgtaggcatttgttacttttgatgatttcctcacaaatataacacttttttagtaagaatctttccacttagagccctagaattatagtgctactttaattcttctgcattgactttttctttcatgctgtcagctttgaataacaatcacagtaatggcagagaacaggcgaagagatcaggtcattaacaaagaatggtagataagtcaagtctgtactggcttaccactgagcccatgcaaaggaggagaaatacctcagttaaaaattttccatcaaaatctttaagagtatactgaagaaaagacagtcatagcacttccagcaacttctaaaggctacatgtttaatacttcatgttaaaattactccaaatttgcactaaataccaatgaagtgttatttttccttagttgtgttgc

SEQ ID NO: 38 - DNA, 319 bp, Bos taurus
  Clone ID: 05-BOVMS1-013-Q1-E1-B1
attttcatccttgctttattctttcctcatttaaagggaggaaatagtcaatgataaagtgcattttttaaagttcaaaaatctatttcattgtattgacctatgtgggaaaagaagctgataaagatatatgtatatacatatatatgtatgtacatatatatctgaaccactttgctgtacacttgaaactaacacaatattgtaaatcagctatacatcaatacaaattttttttaatctatttcactactccctacctcttattcaccctcctcgctcaaatatatcagatctattgatacatacttgaatatat

SEQ ID NO: 39 - DNA, 304 bp, Bos taurus
  Clone ID: 05-BOVMS1-013-Q1-E1-B9
tcaaaaaatgtgatacacttcagcatgcacaacagacttgagaggaatgtaccacaatgtttggagaatatgggtggactgtctgccagctgtatgctaacgacagcatgcattctcagtgatgaactctgctgaatatttgcaccgattgttcaattcgaagattttctccacagaatgtcatgtcaggtaaaccctgcagtgaatctacattggacgcatagctgtatatcccctgtttcccagcagaattgtctaatatgtgtgccggacatttagacactctcgtacagctgctcaactc

SEQ ID NO: 40 - DNA, 288 bp, Bos taurus
  Clone ID: 05-BOVMS1-016-Q1-E1-B1
gtcggcaattacacgtgcatatggattcatgtacattgtgcatttcggccaatccaaagtaccgtactttcactgactataaagtttcctttacaatattcattcttaaatagtcccttgtaggtacacgtctcattatttacatatgctttataagactcctgaacttcatctagatcctaataacatgacttctctgaactattttagtcttcctcgactcggctgaaatgttatcaaatactgaaacctgaagacatgcagtgcagatcttataatgcactttga

SEQ ID NO: 41 - DNA, 111 bp, Bos taurus
  Clone ID: 05-BOVMS1-020-Q1-E1-B1
atttgagtccctggttaatactaatttccatgtctgaggttctgtcttaataaaatgaataaaataaaaagaataaatatcttgttaaacaaaaataaactaatttcactg

SEQ ID NO: 42 - DNA, 64 bp, Bos taurus
  Clone ID: 05-BOVMS1-021-Q1-E1-B1
aaaaaaaaaaaaaaaaaaaaaaaaagaaaaaaaaaaaaaaaaaaaaaaaaaaaaaaaaaaaaaa

SEQ ID NO: 43 - DNA, 408 bp, Bos taurus
  Clone ID: 06-BOVMS1-002-Q1-E1-B5
agcaacacaaagcttttgcatattgcatattattaaacatgctgtacatactttttgtgtttattgggaaaggaatgcaaagatgaaggtctgttttgtgtatttttaggactactttggttactttttggaagttgatattgtaaaagaataaaccaagaattgattgggaacgtcatttcaagaagtcccctctcctccacatttgttttgccagtttgcacattaaatgactctttctcctcaaatgtgtattatggggcaagaggggtagggtaagatataggcagttgggttttttcaagggccctttttcagtaactggaacactctacaacaaagagacttatttaactagatgacagtgactatttttgtttttattaaaaggaagcttacatgccctac

SEQ ID NO: 44 - DNA, 339 bp, Bos taurus
  Clone ID: 06-BOVMS1-010-Q1-E1-B9
aattgtctctgttgaccttagtgtcctgttcattttaatgtaatatgactgatggagatgagatgtcctctacttggaacaaatgtgctcctttttcttgcaatctttaaaaatacatccatctaaaagccattagctggacccctcacaggacttctaagcagagatttaaacttttaagtgaacctatctgctagaaggaaattgggaagaatttaatgatcagggtaatctattattgttttctacatgtggaaactttctgtcttggatattttatctttttttttttttttttatctcagtgttcacatttttctggaagaaaccactgtgcac

SEQ ID NO: 45 - DNA, 217 bp, Bos taurus
  Clone ID: 06-BOVMS1-013-Q1-E1-B5
accactcgtccgtacatcattgcattaatcattcctcatttaaaaggaaagaaataaacaatgaaaaaatgaaattgttagaagttcaaaaatctatttcattgtcatcaacctaagggcgacctctcaataggttcaaatctaactacacagataaagatgtatgtatacacttcactaatccaccttagtgtaaacttagtgagcagtccattta

SEQ ID NO: 46 - DNA, 257 bp, Bos taurus
  Clone ID: 06-BOVMS1-017-Q1-E1-B9
aataaaaacaaatcaaacaaaaaaaaaaaaaaaaaaaaaaaaaaaaaaatcagaacaaagggaggaagctcgaaaggtttttaccttggtccctcctgatcgcgtcatcatggggcttctacacaagctggaagataccattcagtggatttcatttccacccgccttcacggggaagatcttggggtcactcgaacatatcccatttgagcgattggcaattccaaattagggtgctccggtcagaagacagatgg

SEQ ID NO: 47 - DNA, 388 bp, Bos taurus
  Clone ID: 06-BOVMS1-018-Q1-E1-B5
gctatcagctgttgttttccatcattatcaaaaataatgtggccaacgttgtgcatttaatgtgcctttctgatagtgtaagaaaagcctcttattaggtttgaatttctctgatatggattctttgtaacagctaatttatggaatacagcaaatgagctctaggagaaaattatttttccttgttaaagaataatctcaaaaaaaaaaagaataatctcagcaatggtaatcatagaaacactatggtaatcattggtaatcattgaaacacttttccttaggtttgccacagaaaaataatctactttagttctttaataatagtttgagatcccaaacaagcatgaatattcatttttctatgaacattaaagctactagagat

SEQ ID NO: 48 - DNA, 279 bp, Bos taurus
  Clone ID: 06-BOVMS1-018-Q1-E1-B9
acgcgtccgaccatacccaagccatttacataaattgttactggaaaaaaagtttgtattctgtctaaaaagataccagcgtacgtatccatatataacgcacatattaaccatattacacatgcgtaacaggtgtaactacttcctctttaaatttgagacctgtatcactagtgacaaccaaacctattggaaagcacttaatcactcctccttttggaaagactatatcactgtttggttactttaccatcacagttgagaaccacaatgggattt

SEQ ID NO: 49 - DNA, 280 bp, Bos taurus
  Clone ID: 06-BOVMS1-019-Q1-E1-B5
aatctgtcttgctggattcgttttgctgtatgagaaagcattatttggttaacaaatcatcgattctgtcagtaccccgggaaattcacatgctccaattggagaaggccagggatcaataaagtctcgacaatggtgtgcattatcacacatcattataactatcagggcaatatccgaggaattttggacagtcatgacagctctgcgttcaacagcatatgtaatggtagctgcgatgcaaaggggttgttcatcttcacatctgacaatcctgctg

SEQ ID NO: 50 - DNA, 263 bp, Bos taurus
  Clone ID: 06-BOVMS1-020-Q1-E1-B5
ctactttgtatcaagtttcccctctcgggttccattttggagagggaatgctgagcaggatacccccactgaaaatccaggatccttgtgggaatggagggaaaaggcaaggaaggatcattctttccacctttacttgaagtccccactccaagcaccttttcttaccaactcagagctccccttccactgctctgtatggaacctgctcttttatggaatttgctctgccttcagtaacagttaataaacttcatcgaaat

SEQ ID NO: 51 - DNA, 418 bp, Bos taurus
  unsure (369),(397): unsure at all n locations; Clone ID: 06-BOVMS1-022-Q1-E1-B5
cacaattatagacagtccatgtttcattgtgtctccacttaactctgctcctgcacttgctctgagaagtccagcaagtattgaggtagtaagaccattggaggctgctagcgccatcctgtcccaggctgatgcccaacaggtagtactgaaatttactgtccccgtctttacaaattctctggaattttttacttcatttgctcagagaagaggactgcaccaaaaaggtggaagcccaaatgtagaaggtgctgccaaagtgctgtggtctgagtggacaggtgctttcttaggttactattgccatccccctgcatcttggactcctcctccacattttaatgagagcattgtgacagacatganatgggggcttgatctggaagaactgganaagacaatgcacacagtatac

SEQ ID NO: 52 - DNA, 470 bp, Bos taurus
  Clone ID: 07-BOVMS1-003-Q1-E1-B3
ggtcgaccacgcgtccgcaccaatattataacagtttacctggtggattcatcacatacgctttccccgatctaattagtttttgtatattatttccaatgtttggaagctctttataaccattttggtatttcctattactccctcctattttaaaaaaatatatatatttatcaatctaaatgtgtgcagtgtagtaaagattcaaggtatgtttgagatgtataagtagaattttaagtaaactggtcaccttgggcagtgtttgtttttggttctgttataggcttaactggtagaggtataaatttatttatctgttgtacagatttgattacagattttaatgttttaaaaattgcacttgtttgctgttactgtgtatggggtaaaatattttttgttcatggtatatgaaaatatggaataatttaaacagtaaataaacattctgtggatgcttaattttg

SEQ ID NO: 53 - DNA, 230 bp, Bos taurus
  unsure (128): Clone ID: 07-BOVMS1-004-Q1-E1-B3
gtggtgtgggttggccttccaactaagtgtataacctaacaatttccaaaataatactaactaattggaaacccatttgaactctccacatttggtacccaaaaattgtttaaaaaggtgggaaggangagtgaaatttattaacacgtttgccaaatatattgagatttggcctatgaagaacactttttcaagtgttaagttgtctttaccttaagatttagaagtac

SEQ ID NO: 54 - DNA, 438 bp, Bos taurus
  Clone ID: 07-BOVMS1-009-Q1-E1-B11
gcgtccgtctaaacttctctgtcatctcattcaggcacgtctactgcagaatatcagcgcggatctaggagcttgataccttatagccccatctgtctgtacacacattgtgggcataacttgtatgctcctcttcgggatacattgggttgtgcaaaaatatatatcatatctgcatttacaaacaccaggcttcaatgataaggaagtcatcttgcctttcaagcatttatcagtcacttagattgtgaataacctgtgaggtgtaatcactaatagataatatcagatgatgaatgactttctcaactgggttctgcagtggtgacgtatgtatgtatgggaaacatcatgtatgataggtccaagtcaccctctttgtcacgcacattcatgtatcatccttacaaattcttccgatgggtcatgttctgtctg

SEQ ID NO: 55 - DNA, 110 bp, Bos taurus
  Clone ID: 07-BOVMS1-011-Q1-E1-B11
ttcattttccccaagcgccgcccaccatcgggagctctggctaatggagctcacctgaagctgttgctttttctctactcaaagcaacatataaaagcaatggtggcctt

SEQ ID NO: 56 - DNA, 290 bp, Bos taurus
  Clone ID: 07-BOVMS1-013-Q1-E1-B11
ggagaccagctgctctcagtgcggtgctcaccttgggcacattttcgacgatggacctcgtccaaccggcatcagatactgcataaactcggcatccttgtctttcagccctgcagagagcagtggcgcccagggggacagcgcggggggcagcccggcccccggtgacaagacggagctgtaaagatgcagccggtggcggcgacagaagaaacaagtgtacttaatgcacagcttactaaagcgaatcccatagcgttaaaacaaaatgcgtcaccatgattcagatc

SEQ ID NO: 57 - DNA, 67 bp, Bos taurus
  Clone ID: 07-BOVMS1-013-Q1-E1-B3
aataaaaaggaagctctagaagattcaatcttaaatacgcgtgcatgcaagggtcatagctcatcaa

SEQ ID NO: 58 - DNA, 409 bp, Bos taurus
  Clone ID: 07-BOVMS1-015-Q1-E1-B11
cacgtttgacccaattctcgcttcatctggcatagattatgacataaaaatctggtcaccactagaggaatcaaggatttttaaccgaaaacttgctgatgaagttataactcgaaatgaactcatgctggaagagactagaaataccattacagttccagcctctttcatgttgaggatgttggcttcactgaaccatattcgagctgaccggttggaaagtgacagatcagaaggctctggtcaggagaatgaaaatgaggatgaagaataataaactcttactggcaagcacttagatgttctgaaatttgtataagacatttattatatatattttttctttacagagctttagtgcaattttaaggttgtggtttttttgagtttttcccttttgaggggataa

SEQ ID NO: 59 - DNA, 131 bp, Bos taurus
  Clone ID: 07-BOVMS1-016-Q1-E1-B11
ttgggggggtatccgacgtcagagctctttcaatcgtgtcacgaagatgcagttcaattcccgtcattttacacactttcgtacttgaacaacccttgttatgaccctctacattcaccatatagatcaat

SEQ ID NO: 60 - DNA, 169 bp, Bos taurus
  Clone ID: 07-BOVMS1-019-Q1-E1-B11
ccggatacttcactggggaaggagcatgctttgtattttgtacttttcacttactatttcactttacaataactgtacaacactttgtatataaagcttacgattaaaacttattttgaaagtaaacatcaaaaaagacaccaaaaaacaatacaaaggccagtcaatt

SEQ ID NO: 61 - DNA, 419 bp, Bos taurus
  Clone ID: 07-BOVMS1-021-Q1-E1-B11
gaagataaaaaatgccttaaaatgtggggttttcaaagaaaaggaaaaaagggtattacttagcaaacacagaaaccttaggaaatgtcccccatctgtggaccttcactgtggtgtttctaattcttgcacaaaacaagggttcagcatagacgatactataaagggatgctgtacataagaaggtttcctctgtggggtttattctcttctgcttaatgtatttgagtgcaatataaaaagtaattaaaaaataaaattaaacattaaaaaaactctctgtgcctactttgtagtttaaactatttgaatttataagataataagatacttataacactgtgtaaagtagaagaaaatacttggatgagtcccataaatttatcaaattttgataaaacattttgataatccggggc

SEQ ID NO: 62 - DNA, 338 bp, Bos taurus
  Clone ID: 07-BOVMS1-021-Q1-E1-B3
cagaaaaatcaggtttcttttcttccaaaatgatttagcacttaaaggagattaacttgcggatcattaatcctaatactcttgaggatgtgttccccttctgcatatgcggttaatttgtgagttttactgctaagccattgtatctctctatcactgggaagttgtagaaacttctgcccatgatctgttgctttatttaaggagctgctgttgcctccaggaaactcaagaattttgtatgagctttttttttctttcacctcctttctttgctcctcatgttcttcaaaccagtgttttggaagtatgcatgcaagcctataaatggagaccac

SEQ ID NO: 63 - DNA, 367 bp, Bos taurus
  Clone ID: 07-BOVMS1-022-Q1-E1-B3
cacaattatagacagtccatgtttcattgtgtctccacttaactctgctcctgcacttgctctgagaagtccagcaagtattgaggtagtaagaccattggaggctgctagcgggatcctgtcccaggctgatgcccaacaggtagtactgaaatttactgtccccgtctttacaaattctctggaattttttacttcatttgctcagagaagaggactgcaccaaaaaggtggaagcccaaatgtagaaggtgctgccaaagtgctgtggtctgagtggacacgtgctttcttaggttacaattgccatctccctgcatcttggactcctcctccacatttttaatgagagaattgtgacaagaca

SEQ ID NO: 64 - DNA, 66 bp, Bos taurus
  Clone ID: 08-BOVMS1-004-Q1-E1-B7
aaaagaacaaaaaaaaaaaaaaaaaaaaaaaaaaaaaaaaaaaaaaaaaaaaaaaaaaaaaaaaaa

SEQ ID NO: 65 - DNA, 90 bp, Bos taurus
  Clone ID: 08-BOVMS1-010-Q1-E1-B11
gtgaatgcgcgcaaatcggcttcgccaagtctggagagttcaggctgtctgtgctagttgctgttttggggcacgaaaaatgccaggtct

SEQ ID NO: 66 - DNA, 386 bp, Bos taurus
  Clone ID: 08-BOVMS1-012-Q1-E1-B11
gtttcaattttgggaaagttgtatctgctggtgtcagcaattctgattctgaaataggatcaggcttttactacatacaaccgccttctctttctatttattgtgtcgactcgtggcttatgattaaaggcaggcaaagtttgcagactctaaacccttaagagctgtcttaaggacatttatttttttccctttttaagtaattttacactttttagtatctatttcagagtcatatttaaaactatttattagtgaataccgtacatgagacaccaaggttactgagatgacaattcttcaacgttaatgataatgtggtttatactgtgccttaatagtaatgctatttaagatatttatttttaagttttactatgctgcac

SEQ ID NO: 67 - DNA, 376 bp, Bos taurus
  unsure (331): Clone ID: 08-BOVMS1-018-Q1-E1-B11
cgaatccctaggtcagtatgctgctgcatcccaatcgtgtaacttcgcactcaggtttttccactccaaccagaaagatacctcagaatatattattcaagcttacaaatatggtgcatttgagaagatcccagagtttatcgcttttaggaacaggctgaataattctcttcattttgcacaagttcgtactgagcggatgttgttagaccttctacttgaagcaaatatatcaaccagcttagcagaaagtataaagtcaatgaatcttcggccagaagaagatgacattccatgggaagccttgcgagacaacagagacttaaatgtnttctttagctgggatccgaaagacagggatgtttctgaagaacat

SEQ ID NO: 68 - DNA, 329 bp, Bos taurus
  Clone ID: 08-BOVMS1-019-Q1-E1-B7
gtttgcttaatgcacttaagttacttgaaatgttaaatttattatgcagtacttacatttaatatgtgtatatataggtatataattttaaggttaaaatattcagtctgaaaactactgatttggttcttattttaagctgttgggctattactgcatatggcacaatatttaatatttgcaggatcatctcggggaggaagtggattaagatatttaaaaatagagataatttatgaagcgtttctgacaatctgacttactagacagcaagcaatatataacactgaacaagtatttcttttttcagaaatggaacattgacattt

SEQ ID NO: 69 - DNA, 443 bp, Bos taurus
  unsure (428): Clone ID: 08-BOVMS1-021-Q1-E1-B7
gtcctttacatgaaaaagcaccaagtaagtccaatctacatctcagattaaaacagttaaacacattcaggacttaaccacttttaagaatagtactaccagtagaattgaaaatgagttattttaatcttctcaagataaacccatttgcagcctcctggccacatgtacttagatgtttggagtagtccgtgaatcatttcattttcatcctaaaatacagactttgctctctagatgaaataaaatcatgtttatcaatctgaaagtttatatccagtaagtagactacttatagtattgatatactgcagtcattctaagggcttggaataggattttccaagtattaagtactgtccagtctaaaatatggagtgtcaatatttgcatatccttgtctcccacagagtgggggaaggaattangaatacaacctgttt

SEQ ID NO: 70 - DNA, 158 bp, Bos taurus
  unsure (126),(129): unsure at all n locations; Clone ID: 09-BOVMS1-003-Q1-E1-C9
aaaccctcaacaaaatcggcggccaacctgggaacttgcttcatcgcttctataatcaatcaactcctccctcaactgtcggcctccacactctctgctgcttaatagactccatttggtctccanaanaaattgaaatcgatgttctaaaaaatgaa

SEQ ID NO: 71 - DNA, 465 bp, Bos taurus
  Clone ID: 09-BOVMS1-007-Q1-E1-C9
ggtcgaccgacccgtccgataaggtaaaagttttacaagcttaaaaagctaataaatgatgaaataaaaattgaatctgtgtttaactcctgagagttttctactacacatgccataaatctgaagccagttacagagcatatttatctggaagggaacttttaggggtggaccagatccatcttcatattttagaagaggaaatagtcctgaaaaggcatttgtttttctcaaggttacctagatgagcaataacatagatgtgaatagcaattgtatttttaaaaaataataataaatttaattaaaacattttttgagttattcttcccaaaagacattttttctgaaataaagtctgctaacttagcatggtgtagattttttatgttccatgctactcattttgtttaactagaaatggtgaaatttcaggtttcaactgatgtgcaacaggtgtaaact

SEQ ID NO: 72 - DNA, 302 bp, Bos taurus
  Clone ID: 09-BOVMS1-011-Q1-E1-C9
caaaaatccctggattgaagcgtaaagctgaatgagaaagcctgaaagagttaacaatagaggagtttatctttaaaggggatattcatttgattccattggggaaggtcagggaagaacaaagccttgacattgcagtgcagtttcacagatctttatttttagcaacgcagtgtctgaggaaaaatgacctgtcttgactgccctgtgttcatcatcttaagtattgtaagctgctatgtatggatttaaatcgtaatcatatttgtttttcctgtatgaggcactggtgaataaacaaa

SEQ ID NO: 73 - DNA, 368 bp, Bos taurus
  Clone ID: 09-BOVMS1-013-Q1-E1-C1
aaaagagttgataccatcagtcaaaagctaatctgttacactggactcagagattccatgtctagtataatttatcttgcaaataggaagcaacacatatatacaatttatcaggcttatttttatagcagaagtgagaagagtgttaaattataatacactgatacaatggatacgttctgtgtagcaatatgagagaatgaagaagctttcatttaactgtatagtaacacagagttatcaccaagatgtgttttaaaatatttccaacattattgctcaatgggaaaaaaacggcataaacatatacataggctactatatctataaacttctggagaaatacattaaaaagtggtaacattgtc

SEQ ID NO: 74 - DNA, 278 bp, Bos taurus
  Clone ID: 09-BOVMS1-013-Q1-E1-C9
ggatttctcacaaatataaagcatataagcatgaatgaaaacaccttgaagcaattaacaataaactgcatttgtctttaaaagggacattcacattgattccaatggggaaggtccgggaataacaaagccttgaacattgcaatgcattttcacatatcatgagggggaccatcccaatgttctaaggaataatgacctgtcttgacagccttgtgcttctcaacattaggtattgatagctgctatgtggggatttatatcataatcatatttgg

SEQ ID NO: 75 - DNA, 90 bp, Bos taurus
  Clone ID: 09-BOVMS1-014-Q1-E1-C1
gcgggaggcgcggccccttctggggatgtgtctggaaggaataagatgaaacattgcaaagcaaaaaaagtgaaaagaaaaaaaaaaata

SEQ ID NO: 76 - DNA, 333 bp, Bos taurus
  Clone ID: 09-BOVMS1-016-Q1-E1-C9
aaaaaaaacaaatcatgaagtaataggttaaaagaaacatgtacgaaatcaaaaatcaaaggaatgaaaaaaaaaaatgaaatatagaaaaaaaaaaaaaaatcagacatcaaaaaaaatggactacttggaaaaatcaaacaaaaaaaaaatagggggggccccccccataagggggggagataaaaggggttttgggtcaacggggaaaatttttggggggggggcagaccaaaaaattttgggaatataacacatgtcgcccaaattttttgccccccagaggggggaatatttgggggcgaaaattttcccccccaatggggggggggg

SEQ ID NO: 77 - DNA, 429 bp, Bos taurus
  Clone ID: 09-BOVMS1-019-Q1-E1-C1
tggaggaatctgaatgcacataaattacatgaaaatgttaaatttaataagcaaatacttacatttaatatgtgtataatataagtatataattttaagagttaaaatattcagtctgaacagtactgatttggttcttattttaagctgttgggctattactgcatatggcacaatatttattatttgcaggatcatctcggggaggaagtggattaagatatttaagaatagagataatttatgaagcgtttctgacaatctgacttactagacagcaagcaatatataacactgaataagtatttcttttttcagaaatggtacatggacattttagagcatagaggttatttgagttctgccttttcgtgacttttttgaaagtgcaaaccattttttggattaccttaagtaaaatgtacacgc

SEQ ID NO: 78 - DNA, 346 bp, Bos taurus
  Clone ID: 09-BOVMS1-021-Q1-E1-C9
aagacatcagtggcttgaactatgtgaattctctctgtggaccgaaagggtatttaatgaagaataacatgaatcttgtccttcaggattttatcttgtaagttcaaagaaaggatataaatcaagacttgttacatggaaagaaaaaggtactaagatagaggacagaattatagtttcttttaaatcacatgtcagcagaaacaattacatcagaagcttgcaagctgagagatggaaaaccagattactatttattgttagcatccttttcatctgtaataaagtattggaatatatttttattttaatttccagtaactttagaatacacatacttttttgc

SEQ ID NO: 79 - DNA, 454 bp, Bos taurus
  Clone ID: 10-BOVMS1-004-Q1-E1-C9
cgggccgaccacgcgtccgacagccactgtcttggcctaatatttgcaaaatggatgatgactgggaccagctatagcaccaaaagtggtttggcataaagtataattcacacattatgaagaacagtacagaaaatgtgatcagccatctgatagcctcgttcgagtttttggtttgtatgttaaccctctttgaggttcccttaggtttgattcctttggtgagaagtagaagcttctcttcttacccgccactcagctctggtagcttcttcagtgatttgttagtgacctctgtaccctgattctgtgcttccctattccaggttcacgagaaggatgtgattggtattgcacatcaccctcatcagaacctgattgctacttacagtgaagatggactgctaaagctctggaaaccctaattcagcttctctttttaaactaacttgag

SEQ ID NO: 80 - DNA, 416 bp, Bos taurus
  Clone ID: 10-BOVMS1-005-Q1-E1-C5
gatgacagtctaattgtacttgaggttgagaaaataagtgtctttagaaaatctcatttaagtccgtttgttcactgcagttcaaaattgaggatgaatttaattaactagcatttagccactttcccttgcccttgaaggaaaagcctcttgttgtcaacctgatttttgttaagaaaaatcctgtataaaaaaccaggtcattaagatacatgtgatacgatggcatcagatgttctctttgtagctgtaactaagtgatacatttctcatggtgggttggacagtaatagtgttaaagagggccaggagctgctggtttctgctgtttgttctcagtgccctttggtttcattttttttctcttttcaaccctaagaagtgggcatcagttttggaaaacgtggcctgtggag

SEQ ID NO: 81 - DNA, 176 bp, Bos taurus
  Clone ID: 10-BOVMS1-008-Q1-E1-C9
ccacgcgtccagtcaagggtaaaagagtttgaagcagagccagataaaaatggccttaagacatttcagatgctgttaaaaattattccagtatggctattaagtgaagaaaaaagagaatatggagttcgcattgctatggagaataacatagaacatcaaaaaaatcaacaaaa

SEQ ID NO: 82 - DNA, 55 bp, Bos taurus
  Clone ID: 10-BOVMS1-010-Q1-E1-C9
aactatgaccaaaaatctgtcacagaatttgagacccattaaaaaaagtttaatg

SEQ ID NO: 83 - DNA, 60 bp, Bos taurus
  Clone ID: 10-BOVMS1-018-Q1-E1-C5
aaaaaaaaaaaaaaaaaaaaaaaaaaaaaaaaaaaaaaaaaaaaaaaaaaaaaaaaaaaa

SEQ ID NO: 84 - DNA, 428 bp, Bos taurus
  Clone ID: 10-BOVMS1-019-Q1-E1-C5
aatttccacatgttccttggcagcaggaagaaagctataaaaagaatcagacctttcgatgagaccagtgttcggtgccatatgtaagcctggttaattggtgttctaaaaactgtcaaataagacactctgtgaaaggtacacattgtttaactggttaaagagtacaatgcatcaagccaacagggtcttgacctgtctttgaaacttattatgctggcctgcaccagacgatgtctgcattactcattgctaaaaatgttgtgtacaacacaactgcactatgattaatttagttacaataagaaattagaactctacgtttggttttcacatagagcaactctttggagtaacatgcatctgaattttaagttgcaaaggtatctgaatacttaaattttcatgtgcatattttgttgaatgtt

SEQ ID NO: 85 - DNA, 304 bp, Bos taurus
  unsure (284): Clone ID: 10-BOVMS1-020-Q1-E1-C5
ctgcagtccagagcctgcagagaagaccaccgctacgaaacaaacagaagtcttctttagagtgagtagtaaggaaagatgacttcaaagcaataccacacaatacttctttaggagcccttatggcaaaagctatagtatgtacttctagacttgttttgctggctagtcttaaaaatgcagtccctaacttaaaaactaaaataggaatatgttcccttcacatatggaagtgaaatttctaccccagcacgagtgggatgtggccttagaggtatgtacangagtgccagggcacctgtgc

SEQ ID NO: 86 - DNA, 445 bp, Bos taurus
  Clone ID: 10-BOVMS1-021-Q1-E1-C5
aaactcttccagctcctaaacagttacgtgtccgaccaactttcagcaaatatttagcacttaacgggaaaggtctgaatgtgaaacaagcttttaaccctgaaggagagtttcagcggctggcagctcaatctggactctatgaaagtgaagaactttaaccactctaccaacattggaaaacacaacaactacactatcaataatatattcaattaaatttttgaaataaatccatagctgtattaacagattatggctttaattaggtaatacaactaatatatatttataatacatttatcctttgattcctgcacatttatttacctctctggtttgtgaagcctacagaaaatctggatttgtaattgtagaagatctttgacaaatgtgagattttaacatttaagtcatacacacacctacaggttataaattaata

SEQ ID NO: 87 - DNA, 131 bp, Bos taurus
  Clone ID: 11-BOVMS1-001-Q1-E1-C3
gggcccacccatccgatcaaatgcactaaccaactccaaaactggggtcccccctcggtgttaccaccaccaattgtgccgtgcaccattcgaggtatccataaaattgccctttggaagtttttgtgccg

SEQ ID NO: 88 - DNA, 413 bp, Bos taurus
  Clone ID: 11-BOVMS1-002-Q1-E1-C3
agatttatacctgacttgggaatcgaaatagcgaaatggactcccacctatgtcgctggtgaaagaaatcctcgagggacaggtctgtgtcccttcctgagtgaagggaaggttgtgctggtaatatatctcctccgacaagaaacaactactttttccataagagatatgtcacctcacttcactaaagaatgctgagtcctaatcagtatagaaaatgttttaaccattctaagctgataatgaactcttttgtaaccattatatactgtagaacacgagtctcttttccctgaaattttaaatgtagaaaaacgctagatgttagagatttcctttttgttaaataaatggttaaagtctataaaacagataaattttacgcacggattgtgttcataccaaaaggttaa

SEQ ID NO: 89 - DNA, 380 bp, Bos taurus
  unsure (253): Clone ID: 11-BOVMS1-004-Q1-E1-C3
gtccgggtcataattgccaaccggcggcccttttttttttttttttttttttttttaaacggtgggggcgaatttaatttccaaaagcagttacaaccaaaccagaaccaagaatcaaccgggaacagaaggtatggacatttccaaaatcattacccaacggcatttagcttaaaagcacgtgtccatccaacagttccctccttgtctgagatttcactttctgcagtttgttacctgtggtccaaaacanaactagatggtaaattctagggataaacaattcataggtttaatactgggtaccatgagacggaatctcaatctgctccatctgggcaagacccgattcaaccctttctcgggcatatctacacagt

SEQ ID NO: 90 - DNA, 472 bp, Bos taurus
  Clone ID: 11-BOVMS1-010-Q1-E1-C3
ggtccggtatcccgggtcgggcccagcgtccgcatgacaataaccaagcctcaaaaggccaaaatttgccaccatcactacagtttcggcaaacagcccctttgaggtgacactgttgttggcattaggaaaagccagtgtggcaacagtcaaggatgttttactatggcaagttcaatgtgagatggactcattagaaaactttgtcttcaaagaatgccccacactgggatggaaaatagtctgagacaataaaaaccagtttctaggtaagcaaaattgcattaaattcaagtttctttctgtgttagacttgaatgtatctagctagtgtgatttatgggggcttttggtggggttttttccccctatttgctttgtgtgtagaattgttttgaaatactgagtataattgctttgaattttatctctttctgttttgtattcatcctttggataaaatttgtaatcc

SEQ ID NO: 91 - DNA, 440 bp, Bos taurus
  unsure (232): Clone ID: 11-BOVMS1-013-Q1-E1-C3
cagcatcagaatcttttcaatggagtcaactcttcgcatgcaaagtgagggagaggaagaggtaaaaagagactgcagtgcgtgtattgagaggcaccatagacaggggtaaatcgatatgttcttgaaaagacctctttacttctttttgtgagaagttcacactgtcttttctttgtttctctgaggtttggaatgtggggttttgttttcatcagtcatcaaatagtanatgtaaaagtcaaagacctgacctaagaattacaaaactcagaaatattgcattgatactgaggcactgaactttcacaattgttctctgagtgcctgccacatttcaaatacttctggacactgaggatgtgcagtgaacaaatgagataaaactgcctgtcctcatgtcacttacaagtctgggggatgaaactgacaccattcct

SEQ ID NO: 92 - DNA, 448 bp, Bos taurus
  unsure (319): Clone ID: 11-BOVMS1-014-Q1-E1-C3
ctgccagatgcatttgtgtgaaccagggatactgcatctttaatgaacaagtctcttctctttcccctgtttttaaatacaacacaagctgtgtagcactaggtactgcaattgtcaaagacaattagactgaaagcaggaaaatttcacctccctgtctcagtgatatgtagaatgtcggcagcatgggtcagccttgccacagagttgtgtgagaatatatgaatcagtcctatagaatgttaaatatttataaaatggttctgtagtacaccaagcttgggagcacattcattctttgtgttgtcctatgatacanaaaaagctaaagtttattttcaggcttaaaacattctcattcctctcccctacctttttttctcctccctccctctctctgtctccctccgtgtgtgagtgtgggtatgtttccttgtggattatatac

SEQ ID NO: 93 - DNA, 303 bp, Bos taurus
  Clone ID: 11-BOVMS1-016-Q1-E1-C11
ggtccgttatcgcggtgcacgactacgtcatcttagtaaacagacagttgtacttttactccaacttcatatccgtgtctgtattaaatttatcttatgatacataaacttgtatgtttctatacatttctaagcatttcatactatggcgaaatggaggaagattaacatgtaatgttcgatttggcaacacactagtgattacccatcagagaagactaccgacatagtctgattcaattgacttacatgtgtttttaatgtttttatgggattaaccttgcgaaaagaattcctttcgta

SEQ ID NO: 94 - DNA, 56 bp, Bos taurus
  Clone ID: 11-BOVMS1-016-Q1-E1-C3
ccgggtcgatcacgcgtccgccaaaaaatccggttaaagcatacctgaataaaatt

SEQ ID NO: 95 - DNA, 81 bp, Bos taurus
  Clone ID: 11-BOVMS1-019-Q1-E1-C3
ggggtccctaacctctgggatctcataactgatgatctgaggtggagctgatgtaataataatagaaataaaatgcacaat

SEQ ID NO: 96 - DNA, 347 bp, Bos taurus
  Clone ID: 11-BOVMS1-021-Q1-E1-C11
aaaaaaaaattaacagtgtaagtctttgagaaaataggaaagattaaattttagagtacttccttctgcttaacccaataggatccaaaatatccagttaatattcaagcacatccacctattttacactcacaagtggaaaaagaagctcctgaagctattgtagacaatttctggtagtccgtttaacacattcaacccatacaatcacttttacagtatccttatttattatactcatagattttttgtgaatgtaggtaaagttctctccatccttaaaattgtggaattccaaaattgatttcatgtgattttgtagagtttaagactagtgctgagtatat

SEQ ID NO: 97 - DNA, 413 bp, Bos taurus
  Clone ID: 12-BOVMS1-001-Q1-E1-C7
tggcaatggagatctttaaatctctccactcccaatatggtgacacttccataataggatcttgcttcatggcacccatgtctagatatgttattagaatgtagatgttctgcctctgattttggcatatttcctcttccattattaaagaaaaagagaagccattcatctatattaagtatatcaatcacatctcacttagtatagggttagacttgtagtaaattgaatcctccaggacatacctgtcaagctgataacagacacctgttccccaaattttaatgccatagacaacatctctagtccctcactcagtgactttcataaacttcttttaagaaataattttaataaaaattgtttcatcaattttctaagacaataacggattgaaacaacaagaggatgca

SEQ ID NO: 98 - DNA, 435 bp, Bos taurus
  Clone ID: 12-BOVMS1-002-Q1-E1-C7
acgagcttgagtaccttgggttggtctctccatgtaagaagaaattacccccgttggaagaaataaggaatactgaggattttctcattttgtcacatttggcttacgtatgtcattgaaccatgtaaaattgccgatattcaaccattgccgatctacaaaaatgacagtatcatatgcatcaacctaacactcactgctcgatgcaggttaaaatccctgtgaggcaaggggagaagattctttaggaactcagttttgaatgtttttctcttaactcatgtggatctaaaatttaaaaataggaatgaatgtcttaataactacagcttgttgagagtgtgaaacattttgagcacaaaatatgcagcacataacttttcacatgaagtgtgttgcatagaaaaggttaaaatacattctctgagttgctgt

SEQ ID NO: 99 - DNA, 455 bp, Bos taurus
  Clone ID: 12-BOVMS1-003-Q1-E1-C7
cacaaataataaggacaaaatttagttccttcgtgccaaacaaaataactgaaatacctatctgcatgtttgcagcatatctgcctttgggaatgtaatcaaggtataatctttggctagtgttatgtgcctgtatttttttaaagaaatggtacaccagaaaaggactggcagtctacttctaccatagttaaacttcaccctgttaatttccacatgttccttggaagcaggaagaaagctataaaaagaatcagacctttctatgaaaccagtgttcggtgccatatgtaagcctggttaattggtgttctaaaaactgtcaaataagacactctgtgaaaggtacacattgtttaactggttaaagagtaaaatgcatcaagccaacagggtcttgagctgtctttgaagcttattatgctggcctgcaccagacgatgtctgcattactc

SEQ ID NO: 100 - DNA, 428 bp, Bos taurus
  unsure (413): Clone ID: 12-BOVMS1-005-Q1-E1-C7
cattaccagcaacccaaggacccctaaagaaacaggtctcccaggagatgtctgtccctcatgtggtccatcctttggaggctcacacagcacttcttgactggctccctgccttacgtggtggcctgccctggggtctgctggacacaagccacagtgttggggtagacaaggaagataaacgaggggcttctccctctccacagagactctggattttcattgttcctccagttttattgtagggcttaacattcccctcaaaaagctcatcttctaatgcttggtctttgtttcaagaaaagccagttttcttctaccacattttccagcatcaactttaagaaaaatgcaacctccattgcaaaaagaaagtggggtgtatgcctgtggtttaatttcaggttgctttntgagttaagtggtat

SEQ ID NO: 101 - DNA, 177 bp, Bos taurus
  Clone ID: 12-BOVMS1-006-Q1-E1-C7
actgaaattgaaaccgctacgaaagtgacaccaaaattcacttcaatggccctcgttttaaaacgtggacactggaaattccctgacattcaccaactaaaccacattaaaacaaagcacattttcgcaaactggcttacctacaaaagagctacccaccggtagcccttacgaaaa

SEQ ID NO: 102 - DNA, 336 bp, Bos taurus
  Clone ID: 12-BOVMS1-018-Q1-E1-C11
cctattcattcacttgttctttttctccaacttcttagccaaatctgtattaaatttgccttatgaaagaaaaaatagaacctttctatacttttctaaccatttcctgctatttcgaaaacgaggaggatgaacatgttttgtgctatttggtagcccacaaatgttaaaccaagagagaacagtaaggagctagactgattcaatggatttacatgtgtttttattgtttttatgggagtaaccttggaaaaggaattcttttcgtaagtgcagttgggttggttggttgaagcttaagtgaaaataatgtccttgtgtaacggggaaaatatt

SEQ ID NO: 103 - DNA, 369 bp, Bos taurus
  unsure (322): Clone ID: 12-BOVMS1-018-Q1-E1-C7
tgaaaccagtgttcggtgccatatgtaagcctggttaattggtgttctaaaaactgtcaaataagacactctgtgaaaggtacacattgtttaactggttaaagagtaaaatgcatcaagccaacagggtcttgagctgtctttgaagcttattatgctggcctgcaccagacgatgtctgcattactcattgctaaaaatgttgtgtagaacaaaactgcactaggattaatttatttacaagaagaaattaaaactctacgtttggttttcacatacagcagctctttggagtaacatgcatctgaattttaagttgcanaggtatctgaatagttaagttttcatgtgcatattttgttgaatgtt

SEQ ID NO: 104 - DNA, 54 bp, Bos taurus
  Clone ID: 12-BOVMS1-019-Q1-E1-C7
aaaaaaaaaaaaaaaaaaaaaaaaaaaaaaaaaaaaaaaaaaaaaaaaaaaaaa

SEQ ID NO: 105 - DNA, 445 bp, Bos taurus
  Clone ID: 12-BOVMS1-021-Q1-E1-C7
cccacgcgtccgctgacatgctgggaatttgtagtacttttaactcactgagtagtttaaattgagatgagctccatatgaagatttgatcccagagaagcaagcagaagcttctttctcttcttaggctccaaacaagtaacatcaccactcagactaaactgggcagtctgtggtcttggccttgtgtttttcaagctttctgtcctgtactcttttaaactaagttatttttatgtaaaaagtatttcctgaaggttgaattagaacaaaagtcctcccttcctctacatctttcttttgttctttgtggatgtgacgagtaagaatactgctgtcctggtgatgtccattggaaacctgtgttctcttaccttctccagccctccatgatcctcgtattgagataatgaaaaactgactggaaattcaaaactcaagctac

SEQ ID NO: 106 - DNA, 431 bp, Bos taurus
  Clone ID: 12-BOVMS1-023-Q1-E1-C11
gaagcctggtgggctgccatctctggggtcgcacagagtcggacacaactgaagtgacttagcagcaatcctcagaacagccttctgaatcaggtgttatttatcaatagaagaccagggaagttatgaatcttcttcagattcacacttgaacttgatgaagagtagaacgagacctcattcacatcctgtggtttcacgtccagtgttccagtgaactacaggaaagtctgttgagttaaggagtgttttttctctattaatattcaaaataatgaaaataaaaacagaggtgtatttattgtcacacagcttgtttaaagcagcagaggatcatgccaaatgccaatgacttgagataaatgacattgattgtctttagcacatacatttgcccttttggaattctggtcataagagacacatctctg

SEQ ID NO: 107 - DNA, 437 bp, Bos taurus
  Clone ID: 12-BOVMS1-023-Q1-E1-C7
agctgttctctaacactctttaaaacataacatatgctgattttgctttcataattatttttatattggttatgttttcccctgtatattcaagattgaacgtacaactgttctatcatataaaattagttaaaataagtaaactgctcaaaaatagtcccagttttttagcaacactgtaatagagtgatgttaataaaggttaaaattatttagctcaaattttataatgtgtttatgtagccagccagcttaaagaatttttaaaaataaagcataaactatactagtactctttataaaaagttagttgttattttgatgaaggacataaagaataagcaaatagttcatttttgaagagattttaaattgctaatatacctgaattttcttcttatcatttctttatacagtgtaatctttttttgttctgt

SEQ ID NO: 108 - DNA, 117 bp, Bos taurus
  Clone ID: 13-BOVMS1-001-Q1-E1-D1
tctggctaaaccagacagttactaatcagacagtaaccataaagctcacttccaacccccaactatgtggccttcctgggtcacctggggagcaccatttcccagaagaaatctggg

SEQ ID NO: 109 - DNA, 435 bp, Bos taurus
  Clone ID: 13-BOVMS1-009-Q1-E1-D1
cgggttaatactaattttggattgtgaatgtctgtcacgagtgatgggttttaatctgtcctttgtacatcgttttccctttctacattttgctaattatcctgtacgtaagtttaatatatcactttttaaaaagaaaaaattctaaccatttaaaattcatatttcaactcttaacaaccaaatgagaaaaatcagggatgagcagctttataccatttggggtatttttgtaaatgatttacatgcatccgttttaataacacttttacttttttgtaacttcattcctcatataagcttgctatacaggtatgttcatctttgtgtacaaaggtttaaaaaattagttttcatatacataatctaagactttgaatataaaaaagtgactcacagttaaattagtatatacaaacttgtaaatttggtagt

SEQ ID NO: 110 - DNA, 369 bp, Bos taurus
  Clone ID: 13-BOVMS1-013-Q1-E1-D1
gcgaaatctcaaaggtgagcttcatcatagtcatttattgaagcagtttttctacatttcacagctagtgtgtattctgagggactcttagttaccaaaacccaaaatcaacaacagaaacattttaaaggtagcaggaaaaggaggtgatttttagtatggttccctcagtgtttccaagtttggcatagtgttgggttaaggttgtagctacttccagttaacatcatggatgtcctacaacaccgaacacaagttttaatagttcatggtgaggagtacactttggatctacagttcttgtctcctcattcctgacatttacttaacatttataaacatttactttttgcaactgagtgatttatg

SEQ ID NO: 111 - DNA, 453 bp, Bos taurus
  unsure (372): Clone ID: 13-BOVMS1-013-Q1-E1-D9
gacacccgctcccatataagcattcaatcagtgtaacttgcaaaatgcataaacatctgacagtttgaatttatagtgttgatggaagaaatcatttttaatgtgtactgtaaaacttgaaatactcaggagctgagtggatatgtttgttgctacttacaatcccgacctgttagtcccagtagttttgttttaacatggtctttctcaactttgtttctgtttaactacagatgacttctgttgtagactcacaagttgaactgttgtattataacagtattacatgtcaacagtgtggttatgacctttatttatataaaaaccaaatatttagtcaaattactggtgtctaaattaatccttgtacancttccaattttaaggtgcttaaaatgggttacaaaatgcaataaaaatgtaatgatattattaaacaaccattaaaaattt

SEQ ID NO: 112 - DNA, 222 bp, Bos taurus
  Clone ID: 13-BOVMS1-017-Q1-E1-D1
ggagtttctacctgcagactgctccctctgtatagtgtccccatggctcctgcagcagcagccccagtggccctggcccacatggtttcctctgctgatgtctagtggttttatttctgtccttctaaggcaggatacatggacctcaagccctctctctctccacgtttgacatggggtttgaatgttgtgtgttgtgttttttttgtttattttgttctg

SEQ ID NO: 113 - DNA, 271 bp, Bos taurus
  Clone ID: 14-BOVMS1-001-Q1-E1-D5
gacccacgcatccaattagtactgtctgattaggtttggtttaatcagacagttactaatcagacagtaaccactaacctcacttccaacccccaactatgtggccttgctgggtcacctggtgactaacatttcccagaagaaatctgggaaatgttagtcaccaggtgacccagcaaggccacatagttgggggttggaagtgaggttagtggttactgtctgattagtacctgtctgattaaaccaaccctaatcagccagtactaac

SEQ ID NO: 114 - DNA, 264 bp, Bos taurus
  Clone ID: 14-BOVMS1-004-Q1-E1-D5
aacagagcttctcagatgcccacgggcagcaagacacccaagcggtggtagaggcaccgtccattgctttggagcagataccagcttgtgcaccgttttcatgtcttcgagcttagtgtcacattcatgctctggtgaatcacagtgaatgactgttgctcgatgcattctctatccctatgagcattatgtcaatttcaattccatatgctctgactgagatctagggatgtgctgaattaccagttaaaaaccactagtgct

SEQ ID NO: 115 - DNA, 408 bp, Bos taurus
  Clone ID: 14-BOVMS1-005-Q1-E1-D5
gacaaagctgcttgattgttctacggagattaaaggtttccatgagccgcctaagttacctccgtactccacacacgaactctgtgagcgatttacccgaatcatgctgtccctcagtcgaactcctgctgatggaagataaactgcacatactctccctgaacacactgtataaaagtttttagttcttagcccttgccttcctgtcacagggtgtgcttgttgctgctataatttttaacttttattttaataactgcaaaagacaaattgactctacagactttaaccagactgcaaacaataaagctgagaatcccatggcgctcagactttgttttaaccagaactgatgtatgattaccaatccgattgatttgattatgggaaaaccatgcttttgccacc

SEQ ID NO: 116 - DNA, 447 bp, Bos taurus
  Clone ID: 14-BOVMS1-012-Q1-E1-D5
gttagagggaggagttggtaggaaaggactaattctcaccaacagtagaggtaagttctttaactgcagaacctttacatacttcaggtggattcattttgtgtagcaggaattcttgatgtttctgcccgctctcagtgagtgtccccactgtgattggatggggcattgccacacctccttccatgtctatgtggaagccccttgcagaggacaccgatggctcctgccacccatatctgtcagctttcattcatttttctgctcatgctgctgtttgctgtacctcccctgtttttccatcttgttgacagcttgtaaagaataaagcaggaattctttttatatctgaatccttaatgatcagatgaattacaaacaaacaaaaacagttgtaaatagcaattgaagtgttactagaaaaacagtcatgtgcctgttaaccta

SEQ ID NO: 117 - DNA, 273 bp, Bos taurus
  Clone ID: 14-BOVMS1-012-Q1-E1-D9
cagatacaggaaccagaaagaccctcgtgctaatcccagcgcattcctttgatgagaaaacaaggaacatctttcctatgctgatcttgtacatttcctctaagttaagctcatttgcctgtttaaggaaacagtacctgaaaaattacattattgacagtggaattatatatttttatgtttctctaaatgtttttctttttccattgctgaaacaaatctgaaacttgtggtctcctctgaacctcagtggtagctgtaatctactggttt

SEQ ID NO: 118 - DNA, 102 bp, Bos taurus
  Clone ID: 14-BOVMS1-013-Q1-E1-D5
acgcaataaagcttcacttctgttaagaaaaaaaaataaaaaactcaaccaaaaaaataaaaaataaagaacagtcagtggaaaaacataaaaacaaagaac

SEQ ID NO: 119 - DNA, 455 bp, Bos taurus
  Clone ID: 14-BOVMS1-014-Q1-E1-D9
gtttcctataaatggtttgtaatagcacattcatgttaaatcagaactgaaatttaaacatatatacgtgagtatgtatagacggcttcatcagcttatttataactgatggccttactttacaatcttattttaccccaaattaagctattgggcttgaaagtgaaaaggagcacttttgtagactagcagctttccttctcctcttccttgattatatggtggtgacctatttttacagatcatactttatgttgattagcaaaattagtgtcaagtaataacatgcttcttcctgtgtttcttgtgaatctttggagggcaggtattgatgcctggtatttatgatacagtatgtaagtgggtggacagtaactgacagtattgtggtacttgctgtacatgtctgatcttttgaaacagatttttagtaagcattttccagaggtaaaact

SEQ ID NO: 120 - DNA, 90 bp, Bos taurus
  Clone ID: 15-BOVMS1-001-Q1-E1-D3
acagttagtaaaatcttcccactgccagaagattaaaaaataataaatactttatcataaagcttcaaaattatgatcaacttcacatgg

SEQ ID NO: 121 - DNA, 407 bp, Bos taurus
  Clone ID: 15-BOVMS1-005-Q1-E1-D11
aaagaatgatctcaactatcgaacattatttgaaccaagaacacaccatccatatctcctggaaatgctgttagctccggacattcgacatgaaagaaatgtgattttgcagtgtgttcggtacatcatcaaaaaagacttttttggacttaatactactactgtgaacactaaagatgaataggtacccggtgtttcagcacacacatctgaagcatgtaggatagtaacaaactcaagtttgtgggtgaaaagtcttcttttttcaactggatttagtaattaaattgtaagcctcatgggctattgtgtaggattttcaagtctttgacgctatataaataaatagctaattgatttttaagactgtctgtattgttgggatcatatgtaatatttgctggcag

SEQ ID NO: 122 - DNA, 100 bp, Bos taurus
  Clone ID: 15-BOVMS1-005-Q1-E1-D3
atgaagaaacctagtctgtgtcttcacaaaaatgctttaaaacaatgtgtatgtgtgtataaatgtaataatatataattaaataaagttgcaataaaaa

SEQ ID NO: 123 - DNA, 469 bp, Bos taurus
  Clone ID: 15-BOVMS1-013-Q1-E1-D3
ccactttcttccggaactgattacctactgacattccttggctttctcatccagaaattatggaaacagggtctgtcagtggcatgaggctgggctgtgtcccgcgtgaaggacacatgcagtctccttgcctttttacacctgtgcatgctgcccaccgtagacagtgatgtataaaccgtatatagctcagtgtccacatatatacacaacacacacacacagcataacaaggaacactaagacagtgttgactcttgtctctgaagacaaataattaacattttttccaactaaataatggatgtcattaaactatgtattgggaaaaacaataataacctatgtgtttagaaaaggtgactatatccagttttagtgacaaaaccaaattcctgaattttaagcattcaatgagtgagctgccaagtctggatttgtgttgctctttaccaaatgacattttttt

SEQ ID NO: 124 - DNA, 442 bp, Bos taurus
  unsure (110): Clone ID: 15-BOVMS1-016-Q1-E1-D3
tattcactttcctagaataaatatcttaacctaaatttggatagtctccattttggcaactcctctagcagtttggtagcccaaaattgttttaaaaaagttggaaggangagtgaaatttattaacacgtttgccaaatatattgagatttggcctatgaagaacactttttcagtgttaagttgtctttaccttaagatttagaagtactttaggctgttactgattttaagtcctgtcttcacatccctttgggaaacttgtattactctggatttgaaaaaaaagaacaacaaaggcttttcatgtaaagataagaaactctaggctctctcttgccctgccattttttcgccttcatttttctagttatgccttactgcttatcattaaggtagggtaagttaagtttgctatgctgctaacatcctaagatgatac

SEQ ID NO: 125 - DNA, 440 bp, Bos taurus
  Clone ID: 15-BOVMS1-017-Q1-E1-D3
ctaacacattttctgctttaatgaatactgtacagccagaagtacaaagcaaaagacaaatggattcctactcaaaatgatttgaaaaataggtgaagattcaggagatgcaaaagctagaaacacctggggttgtctacatgagtatgacattatcattgcataataagaacctctaataatactgacagcatgaattactgtatctgtagtaaagagagactgcaacagagaaataggataagaagagagggaggtaggaaaaaggaagagagaaagggaggaagaagaaaaaacatctagcccagtcctaccttgaaagtagaaaaatggatagaagcaagattctctactactcatccaagaaatcgttcttcagtgttgcacgtggctgtctgctaaggcacacagagtacttgtaggtggcaaccgtatgctat

SEQ ID NO: 126 - DNA, 392 bp, Bos taurus
  Clone ID: 15-BOVMS1-018-Q1-E1-D3
caacgcgtcgggtcagaactaagtcagggaaagagatggatgaagaaaggcaaagtcattcccaatacatttggcaacactttaatgggaaattgaccgtgaatctattaactcatcttaatttcatagatatagatatatatgtgaaattgagtgcctctgttcttaccctgtcattatttaatccatcatgtttctaagtttgtatcatcttcctgttaaaaaaaaacagaatgtgcactgaactttaaaaagtccaaactgatttatcctatattctgttaattcacaaaagtggaggaggaaagaatggacagtttcctttggaaatgcagtaaacatgtggaatggagccctgtgaggccttcctatctcccaagtctatgtatttt

SEQ ID NO: 127 - DNA, 109 bp, Bos taurus
  Clone ID: 15-BOVMS1-021-Q1-E1-D3
ctgagaatctcctgacttccacatgtttccatctctaaggccctgaggaatgggaggggcttacggagccctgccttgtgtaccatcaataaaagtaccctatacccag

SEQ ID NO: 128 - DNA, 399 bp, Bos taurus
  Clone ID: 16-BOVMS1-012-Q1-E1-D11
caaaagtaggcttttctacaggttccctgattaacatacaagaaaagaggaaatccctggatggcactctgggtctactttatttgattcacctgttagtttctgtcttactctgtcccttggttatctgacttgcaatcttctgtgtctggaaggttttcttcacatttattctgcttccctcctgtttaattttgtatctgtttatcttaaccagcagataaaataaaaaggaaggtgaccgactggtcatcctctccaacattggttattcaggatgcttcaagcttctcgacacttaagtctcagttcttcacacaaaatttctttggttcctttgccattttctcctcagtttttactattttcattactacttatatttaagaacacctaaaa

SEQ ID NO: 129 - DNA, 426 bp, Bos taurus
  Clone ID: 16-BOVMS1-013-Q1-E1-D7
gttgcagtaggactggagtgtggaaagatttgcttagactcctggaaaaagaccgatcaagttccaggatatatacgactggatccgctgtgtagaaacaacgtcatggccgaagtcagacgcctgctagcaaaaaattatgcgggaagaattgtaatggaaagactgaacagaatgaacgagaaggtgctgaatggttacagtttgcaagctgtggtgaagatcacactgtgaggatacacagagtcagcagatgtgcgctgtagtggacctagtgatcacaagcatacacccatcagtgtctgcaaagtacttatcatgtatatggataacctttctttaccacgtatttgcatcgagttacgttttcaagcctatggcactagtccttatacgagtctcagatcccctgaaatatgatggaag

SEQ ID NO: 130 - DNA, 103 bp, Bos taurus
  Clone ID: 16-BOVMS1-018-Q1-E1-D7
accggtcaaggtattccgggtcgaccaactcatcagtagacggccactgctagaggatggaggataacttacgcatgtacaccatgtcatatgtcttctaaac

SEQ ID NO: 131 - DNA, 71 bp, Bos taurus
  Clone ID: 16-BOVMS1-019-Q1-E1-D7
aaaaaaaaaataaaaaaaaaaaaaaaaaaaaaaaaaaaaaaaaaaaaaaaaaaaaaaaaaaaaaaaaaaaa

SEQ ID NO: 132 - DNA, 413 bp, Bos taurus
  Clone ID: 16-BOVMS1-020-Q1-E1-D11
gtgattttgacttgtcagaaggtgacgatgatgatgatgatgacggtgatgaggaggataatgacatggataataatagtgaatgaaagcagaaagcaaagtaatgaaacggaaaatgtcgggaaaacaaaagaaacgtgttatctcagtctgtacaaaacccagtaaggaggtagaaaacaaaacactgcgtttttaggccaatcacatttaggtaactgtcatttctttacaattttacttttgacttgtctttgcttacaggaaaagggggtggggaattaagccaaaaaggtctgttcaatgaatcagcatatgtggtgcctgattatagaaacttgtgattttatatgcaatatagcatttttttaactaatgacattctggctttttttttaatgaatactttataa

SEQ ID NO: 133 - DNA, 130 bp, Bos taurus
  Clone ID: 16-BOVMS1-020-Q1-E1-D7
ctgggtctatgagaagtggtcttaacatgtagaccacttttttaagcagccagatcacaatgaaaacatcactactgtaatgcttggcccatgatgttatttcctcactatcagtctgagacccagcaat

SEQ ID NO: 134 - DNA, 444 bp, Bos taurus
  Clone ID: 16-BOVMS1-021-Q1-E1-D7
cggccctttatagaaaagtatgttaacccctgttgtaagaaaaagagtgtgccttgatacatagagtttttctcttttgtcttctctgttttcatttaagagtctggtattagaagactatttagaagagctttaacaatatgacgttaaagtgaaattttacaaattgaaaagccatatattatttgttctaaacagttacatgagaaggtattttgtcactaatctaattagagatgttatctttattaagcatcttttataagcattattaagaagaagatggatttttgcagatgattctaattacttgtctagtaacagtaggcatcagccacactcccaggaaaagttttcatcctgtaatctcatccctggtaaaaaataattttaaagtgattactgttttttaaatgtatccaagtgaagagtaatagtaagaag

SEQ ID NO: 135 - DNA, 350 bp, Bos taurus
  Clone ID: 17-BOVMS1-001-Q1-E1-E1
aaggccctttggattttatgtcaaaccttgctgtaatataaaaaggaagtttacaagacatgacattgctgcttttacaaaaggacatttctatttattttcgcagtaattttcatgtccccgtgagcagagctgtcaccgtgtgcactaccgcagatcgttttgttgttgtcattatttttttccagtttgagctaatgtgttttatttgtgaatagtcttttacatttttgtatgctgaatatgggcaccaaagaacctgtaaaagttacctttttcaattgaatgtgcacaaataaaagtttggaaaagatctctcttcaaaaaaaaaaaaaaagggcgggcgctct

SEQ ID NO: 136 - DNA, 345 bp, Bos taurus
  Clone ID: 17-BOVMS1-003-Q1-E1-E1
cacaagcacgagggaaagtggcacgatgtgatcttgaggtgccttctgaccttttgtttttactgtagtctttgaaaactctgatgtttatttatgagttattaattaatctcttcgataataagtctctcacaagaacccgttggatagtttgttcatcatttgttctttgaatggtggatggggcagaggttcaagttttgaaaaattgtgaagatgattgaaaaattgatgcaaaacacaagataccaaaaataaaatatttcatctccatttttaataactattatactagtattttataaatatgcaataaagaagtccctcttaaaaaaaaataaggaa

SEQ ID NO: 137 - DNA, 124 bp, Bos taurus
  Clone ID: 17-BOVMS1-004-Q1-E1-E1
ggtcggtttcacgggtcgaccgacgcttcaggcgaaataatggctccatgctacgttcgatgtctaccatcgagtaaatgtggttcacctcacaggacttcgattaagacggtcgcgccagcga

SEQ ID NO: 138 - DNA, 413 bp, Bos taurus
  Clone ID: 17-BOVMS1-005-Q1-E1-E9
aaaaaatgaatgataccaaatatgaatatcaaaactacttagaaggtagtattagtatttgtagtataacagctgtttgactacttgaactcagttggcctagttttcagtttattcaggtagttgctaactaattctgaacctctaactaaaatacacaacactttgggcttaaacataatcattaattcccagattcccatgatagttattatgctatacccaaagactagtttttgaaaggaaaaactacacaaaacctattcctggtgttctttctcaaaaagtctttgtcttgtcttaacctggaaataacttataccaataacgtaatgaagctaatataacagaattgttaaagggtcacgggacaggaagatacgcacagttatgaattgtccgtttcctcccct

SEQ ID NO: 139 - DNA, 345 bp, Bos taurus
  Clone ID: 17-BOVMS1-011-Q1-E1-E9
caatttttaactgcctttatggaattttctgcactttgcattttaaaaaacttcctatagaatttgcatatatatattatatatgatagctttggtagctttaaatcctaaagttcaatattggacctgccagcatccctccaaatctgtgctaagctttttgtacattccttcatgtcatttagaactagaccaggccactgagtgcaattttaatttgtcctaatttttaaaactgttttagcccccgaaggttctatggaatgcttttatccaaaacgctgatttatctgtattgtatttcaaagtgttggcaatagagtttggtttttttttttttttttt

SEQ ID NO: 140 - DNA, 433 bp, Bos taurus
  Clone ID: 17-BOVMS1-016-Q1-E1-E1
cccacgcgtccgataaaatttccttagaggctttctgaagggaaatggaagttcatggagaaatgaaagaaatgtcttggatactgagttttaagtgaaacaggtttgatagcacttctcatgatgcattagggtcattgctatgtaacaaaaaccaacatgaaactaatttaaacacaaaagagtaagtgctctgcttctttatttaaaaataaagaagtgaaaagtcattcatcaacataaaattttgggcactcttctctactttctctgggaaagcattgtatgttggggcattagtttaaaatgccggccgtaacttttgcctgtacttgtagttactggaattttgtttgttttatactttgaaacatacctgtaaattgagcctgtgtgaattatgttccactatatgtatattacagttcctttc

SEQ ID NO: 141 - DNA, 451 bp, Bos taurus
  Clone ID: 17-BOVMS1-020-Q1-E1-E1
ggtagcttgccgtacggtcggacgtcacggctcggtcacgcgatccgctggagtagcatatggcaatagcagtcctacatctgcttcataggcgctccatctgtctttactcccacttaacagtcattacctgagtcaatggtacacatccttcattgtgagaattcacatactacagttggtgtagtatattaatagtgcacgtgaacgtattttgtggatacattgggcacgatgtgatgagtcacctggcaatgtagcctttatggtgaggcatccattttctgtcctccaaatctgtactttaacttgtctatagttttttaacacaaatctcatgactctggttcattctcttaggacattatcttatatggcacacgtagaaggagaagctacgacgaaattgctcacctcgctaagcttctatttcaattttaaccctttagtg

SEQ ID NO: 142 - DNA, 342 bp, Bos taurus
  Clone ID: 17-BOVMS1-021-Q1-E1-E9
gagcagcccccggaagttcgcccgcgcccacggggtcagtgtccgactggacgcctcagacacccacatcctcattctggaaggcttcctgctctacagctacaagcccctggtggacttgtacagccgaaggtacttcctgaccatcccctacgaagagtgcaagtggaggagaagtaagcgaagctacgcggtccctgatccccctgggctcttcgacggccacgtgtggcctatgtaccataagtataagcgggatatggacgccaacggtgtggaagtggtgtacctgaacggtatgaagtcccgcgaggagcttttccaccaggtcctataggacat

SEQ ID NO: 143 - DNA, 440 bp, Bos taurus
  unsure (428): Clone ID: 17-BOVMS1-022-Q1-E1-E1
gcactatcccttttctattaaaataaaaatcagttaatgtgtcaagaaaccaactctagtgaagtcaggtttaatattagcctttcttatgtgtttcatctaattattttggttgttaatatggtgataattattttggttgttaatatggtgataattaaaagtcaaggtaaattttaaatattaggaattctgatttattcagcttgaattatgccaccatgcttatgtaaaaatgaaagtggcaacatggttaaactgagaaagtttctcagttgtaacaattttgattttttctttcctgtgaccttccctgttgtcttgaaccatagcaaaaggatactgcatctcttgttgtattgctgaggttattgaagttacattaaacacatctcagtctctgtttcttggaaggaaagtcctgctanttgactgacaat

SEQ ID NO: 144 - DNA, 111 bp, Bos taurus
  Clone ID: 17-BOVMS1-023-Q1-E1-E1
gtccgttatccccaagctccgcccaccatcgggagctctggctaatggagctcacctggagctgttgctttttctctactcaaagcaacaaataaaagcaatggtggcctt

SEQ ID NO: 145 - DNA, 460 bp, Bos taurus
  Clone ID: 18-BOVMS1-008-Q1-E1-E9
tacggtaggaaaatccgggccgaccacgcgtccagagataaagaaaaaagcttttgaactccttttgcttacctaatgttttgctgtgctcacgcagctgtgtagttttcactaaaacaaaaccaaaataagtcttgtattggagttgaataacagaaatggattttgcattaatgatttgtttatattttcttcatttgaacaaccagcattactgccaaacaccaatcgtggtccatatttgtaacaggtttttaacatgacatagttagcaagtttgactgaagagatttttaggtcctgggtctaataagattttagtatgatcttttttcatgtttctaatgcttgaggcattattgcttaacttggaaaaatctagacagtgttgctgccatttgtaagttttcctatactagtccttttattaacttttaaactgggcttactgggttcaaat

SEQ ID NO: 146 - DNA, 310 bp, Bos taurus
  Clone ID: 18-BOVMS1-020-Q1-E1-E5
gtctgcttaaaaatcataccatttctagtttgtgaaataggtgtcaaaaaagtctttatttttgccaagtgttctttagcaaagcctatgttacaactcctaaaatgtgaagaagcaactaatatagttggctagtatattaataggaaagtgaaagtattttgtggttacattgggcagaatgtgaaaagaaacttggcaaggtggcctttatggtgaggcatccattttctgtcctctaagtctgtagtttagcttgtatatagttttttacaagaaatctcatgacttgattcattctcttataaga

SEQ ID NO: 147 - DNA, 75 bp, Bos taurus
  Clone ID: 18-BOVMS1-022-Q1-E1-E5
gtcctttgtgaatatttcaaccatgtaggcaaattcttaatgttcacatcattaaataaaacctgattcttctag

SEQ ID NO: 148 - DNA, 60 bp, Bos taurus
  Clone ID: 19-BOVMS1-001-Q1-E1-E3
aaccaaagataccctctcgactaaacaaccaagatagaataaaacaaaacatttaatccc

SEQ ID NO: 149 - DNA, 391 bp, Bos taurus
  Clone ID: 19-BOVMS1-007-Q1-E1-E3
cgtccggttaggacagtgtttggcctttcttggggaacagaggggatattcccacccagctgcctcacaggggaaacttggagccatcctttaagccaacaagacgcccctgggtttgagcgggaagaacttcagagttccggaggcatggcctggcccagcctgatgggaacggccgccacccccaccccagctgcaaccgacccccaggacagtgctgcaggcctggagcagcctacccggcaactcttctgggtttcagcaacgagactgccaggccctcgggttctgcctttagcctggaccagagggaagtgaggcaccaggacttcacccaggctgcgggaggcctgctgggaagccatcatggaagcaataaagctcttccctg

SEQ ID NO: 150 - DNA, 82 bp, Bos taurus
  Clone ID: 19-BOVMS1-020-Q1-E1-E3
cccacgcgtccggttccctctttttgtatgtgcattaccgtgtcttctgtggttcttataataaatttatcattcctgtgtt

SEQ ID NO: 151 - DNA, 418 bp, Bos taurus
  unsure (381): Clone ID: 20-BOVMS1-001-Q1-E1-E7
aaatagttgatgtttcttcagccctctgggaaatcattgtgaaagaactacaaactcagtatctgacaccagtgggtctttctttccccacttctcctccaaacataatgagcacgaaatttcaaactccactcaggtgaaaattgctttgcaatgaaacttatcacattgaaattttcactgttaaaagatgtctgtgatatttttaaatacagacttttacatcagtggtcagcagcttggcaactgaaatttggtaagtcaatatattttaaaatacattttaccctccaaaaattgtttttaaacaattgggaggatttttgttgttgtttaaatgtgttttttattgtcattgtaaaaataaaattttgcttgacnccatattatgccatgaataaattgctgagccttcata

SEQ ID NO: 152 - DNA, 405 bp, Bos taurus
  unsure (392): Clone ID: 20-BOVMS1-003-Q1-E1-E7
cttaaactaatgcaagctgtgagggggcgcatcgtatgtttaaagtctactgggagctgatggacctaaaccaaatcagagatgcggtggttgccaccttctttgacatttacgaagatggaatcttggacattgtagtactaagcaaagggtatacaaagagtgattttgccatccataccctaaaaaataactttgaagcagatgcttattttgttaaagtcattgttcttagtggtctctgttctaatgactgtcctcgtaagataacaccctttggagtaaatcaacctggaccttacatcatgtatacaactgtagatgcaaatggctatctcaaaaatggttcagctggacaacttagccagtcggcacatttagctctccaactnacatataatgtac

SEQ ID NO: 153 - DNA, 446 bp, Bos taurus
  unsure (435): Clone ID: 20-BOVMS1-006-Q1-E1-E11
caggtattcaccatctatctcagcaccctctttcccagtgtgcaacagaccagctgcttcagaacccccaaaggaacagccttttggcatcttcacctggtctagctttgaacttatttctgaaaagggtgtttgggaaactgcctctgacctgagcagctctcttaagactatgttctgggcaagggagaggaaaccctacatatgaatgctgctgatgtcagaaggaaagagatcaggaacctagaaaattcatagtaaataaacagcaattcaaggagcccaatttcctttctgatgcagaagcttctctggtgtcttctgtcctgggagccactgccaggttgctgccttgtgactctacatattcttccttaatactctagatgctcagaagagagaaggtgctttcagattattcacagctctctttcncttcagtgcac

SEQ ID NO: 154 - DNA, 68 bp, Bos taurus
  Clone ID: 20-BOVMS1-009-Q1-E1-E7
ttcacacaggaatggtctaagaaaatcaaatagtttctcgatcgtaattaaaactcgatttcattggt

SEQ ID NO: 155 - DNA, 353 bp, Bos taurus
  Clone ID: 20-BOVMS1-010-Q1-E1-E7
gtcaccactaagtcattattatattactgaaatatccctagctgttatcatggtgcagttttttaagaaaagtttgcgctgttgaaattacataatgatctgacataatagacgttgagtcctaatcaattggtacaatttcacaaatcaaaccacacactgtggtattctttgcagagttagtttgtttatctaacaagtctaaacctttatttttacttctgattctttctggtgcttctcttttcactggaaatgcattgaatgggaattgtttattccgttgaagtgacctcttgtgcttcaggtgcagattgatgctgggaggaaaaaaaaaaaaacaggacaaacac

SEQ ID NO: 156 - DNA, 276 bp, Bos taurus
  Clone ID: 20-BOVMS1-012-Q1-E1-E11
gcacaactcagttctcagcacgctacagttagaccaaattctcacgtttcttgtaaaatcagtctggatccaacgcctgttatcccatagtgcatctcaagacagttcacatccatgactgcaaataacaatgatcgtcgcaccacaaatgtataaactcttaatcacctgcctgcatgactaactgctcatgtgaagttgaccagtgttggcatgcgtttccatggtcagtgttcaggtactgattcattagcacacatatcagatctacctttg

SEQ ID NO: 157 - DNA, 191 bp, Bos taurus
  Clone ID: 20-BOVMS1-014-Q1-E1-E11
aaaatcacagacaaaagaaacaaaaatcagggcagaacagtccaagtgcactgacatttaatgcaaatcacttgggacatacgaaaacttacaacgtgttagatgtcacgcgggttgacggacttcaggattaaactttattgaggcatgaaagttgcgtaaaaggactcctaaactttctggaaattacc

SEQ ID NO: 158 - DNA, 333 bp, Bos taurus
  unsure (263): Clone ID: 20-BOVMS1-018-Q1-E1-E11
aatacctaccaggtggttcaattcaatcgtttacctttggtagtgagtttcatagccagcagcaatgctaatacaggactaattgtcagcctggaaaaggaacttgctccattatttgaagaattgagacaagttgtggaagtttcttaatctggagttttcttcatcatatcagacacaatatcaatccagcaatctttaggccacagtgacacttgtatccatgtactcaaggaccccctttttccactttactctagaanaaagagcttacagatagaaatttatggacaggttaatggtaaccttttttggtgtagggcggttcctaat

SEQ ID NO: 159 - DNA, 301 bp, Bos taurus
  Clone ID: 20-BOVMS1-019-Q1-E1-E7
atcgttttgagtaagtgctagcaaacgaatttcgctcatggtgtaagtgttgaaaacaatactttctggaatataccaagtttatatcagttgagttttgtgcgaaattagtaaaagattcgccctttttgaaacatgcgtgtttaaaatatgacatctcacgggtttccacatgaataacctcgctctttgcgtgtcatcattccctctttgtacaatttcaattgtgagttcaccacacatggctcatcagtgaccagtagcctctgcgtcttagacgtttaagttcaaagtctctcaa

SEQ ID NO: 160 - DNA, 278 bp, Bos taurus
  Clone ID: 20-BOVMS1-020-Q1-E1-E7
cgcctgtcaataaacgattccaatccccaaaaaaaatatcaacagtaaatcaaaaaaaaaaaattaacaatcaaagtgattaaaaaaaaaaaaaaaaaaaaaaaaaaaaaaaaagacagccgctcaaaaaagatcaaaacttacatacacatgggggggcacctcaaaaggcttcaagcttattaccccgtttcagttcactgaaagctcttctaaagtgtccccaaattccaattcactggcgttagtttaaaaaatccccatgcggaaaaaccccg

SEQ ID NO: 161 - DNA, 430 bp, Bos taurus
  Clone ID: 20-BOVMS1-023-Q1-E1-E7
cacgcgaccgctacattattcatagcaactgaacatcccataaactcggctttcattttaccagttgtgaatatgaacatctaatttgctaatttagtcagtcgttcattgttacttttagcaaattagcaccataggtaatttaaaaacaaatttgttgcctgctttttatatatactgtgtcataaggttcttgaaaaagctgggggcacaattttgtcttttaaagtttttttttttttttcaaggcaaagagctccccccaacccgtttctcagtatgtgtatgatgcgacttccatgtatatataaaaatgactgcgccctaaccaaacttcctcagattgtgcactgtttgtttaaaataatcacgtattttagtccaatgctgttgtatttttcattttatttaaaacactacgtacttctta

SEQ ID NO: 162 - DNA, 397 bp, Bos taurus
  unsure (126),(191),(393),(396): unsure at all n locations; Clone ID: 21-BOVMS1-003-Q1-E1-F9
gtcggcatctagggtcgacgacccgtccgcggaagcatggggtcacaccaaagggtctgctgggttctaataagctatgttgttgcactttatatatttaaattctagaatctttaagttctgtcncccaccccctctgtgcctcttagaccccacagggatttcaaggtgcaaagttgattgacattgangggctgggcccagggggtggagaggagggaagcaggttggaattggtgccctgggaactgacttcttttattattatttaatttttgttggagtatagatgctttacaatgttgtagtagtttctactgtacagcaaggtgaattcttgacactgtggaactgacttcttgtcaataggagccaataaatgactcaacacanaana

SEQ ID NO: 163 - DNA, 343 bp, Bos taurus
  Clone ID: 21-BOVMS1-004-Q1-E1-F1
gtcggaaacacgggtcgacgacgcgtccgctcaagaaagcatctgtcgtcaccttgcccgcgctcaggtcttgaaataaatccgtgctgcagaaaaaaaatctggctttttttttaatgaatacataaaaaaattcatttgaattaaatcaaattgcatcagaaaacttacaattttggacaatcactacataactcataatcatcatctgaaaacataaaaagggggggcgcctcaaagggttcaagccttaattagccttacagggtactgtaaaccccttcataaggggtcaccaaatttaatttcaggggccgtctttttaaaacttgaagttgggaaa

SEQ ID NO: 164 - DNA, 314 bp, Bos taurus
  Clone ID: 21-BOVMS1-007-Q1-E1-F9
cttaaataatctcgttgtacagtttttcctgctgtcatgtcagctcagaagcattactctatacccgtctcatgtcatctgtatgtatggttggatttgggtgatgatcgcttagattttttaatggattgctgaagatatttatacagatgtgtgttgtgttgcacatgagaatgtgaatcatccacctacttcagttagagcattgcagacctcctcattcaaatctaatgaggtcgataacaatgctgcatcacgtgtgcaagcatgatgagattgatcagtaagcagtcagtcgatatatgattgacata

SEQ ID NO: 165 - DNA, 401 bp, Bos taurus
  Clone ID: 21-BOVMS1-009-Q1-E1-F1
actgaataagagttgatgtgaccacagataaagtacagtaattttttagtccaaaacaattcccttttcgtaagaaatgataaggaaaaattgttgctaaataatctttgctggaatctaaaaattaccttatattccatgagaatgaaaggcccaagaatcattttactttttccgtcatagttttctgaagctacttttaaaaaatacatatatgtgctcagtacttttgaactaacttcttttttcccttgggtcataacagtttaaatttcaaacttttgactttttttttttgtaaatttaagataaaatgctttgacatgaatttttgcttacgtttatgtttgtaaatttgagaccaaatggcaacgtcttaggcaagcaacatttgtgatatg

SEQ ID NO: 166 - DNA, 475 bp, Bos taurus
  unsure (453): Clone ID: 21-BOVMS1-013-Q1-E1-F1
gttaaaacttttaaagtattttagtttacctagtttttcaaatatttttgctgttaaaatattacataaatattttttgtatgtgtattctaaattttaaaaaaccagtttgagtgtgcaaagatggtaataatttaatacatttaatttccaagacatttaactagattctcaatcacctctttcaaaagcatgttttttttccataggaaaaagaagtcaaagtaagctctcaaaattatcctcaaagtaaggggtgagcttgtgatgaaggttggagttgtagacagcagtgtgcacaacggaggctgacatgggtgttgggcatttcaagcctctttgttgaattagtcctttttgtcttcttgcttgttgaaagcatgctttttgctgttgatttaacaaatgcagattgtgataaatttttaaaaaaaaacttttatttttgatgcntcaagcacatgttaactgattt

SEQ ID NO: 167 - DNA, 143 bp, Bos taurus
  Clone ID: 21-BOVMS1-013-Q1-E1-F9
tgcacacatcattaaacatttccatgatgccactgatcggtgtgacatggctgcctccttaaatggtcctgaataaacggtcggaaaagtgacaccgtttgaggtacataatgatgtactggatcattagtcaagtgcatcaa

SEQ ID NO: 168 - DNA, 289 bp, Bos taurus
  unsure (46): Clone ID: 21-BOVMS1-016-Q1-E1-F1
cccactcgacagaccacgcatctgtctgaaaacctgtatcgatgantcctaattagccatctagcgatatggcagtattctcactgtgcaaagctacatagctctaggtccagcacgacattcagttgcaatgcatgccatcagtgggcatcaaccacacttctctatggagtcattgcatgatgctccttatcaagtcgtcctgtacaatccgctcatctatcaatttatcgagtgcacaggatgagctgagtgatccacagtctaggcatcaagcacacaaactcag

SEQ ID NO: 169 - DNA, 265 bp, Bos taurus
  Clone ID: 21-BOVMS1-016-Q1-E1-F9
ccaacaaaagactcagccgttcagttttgccgcgtacctttggtactaagtttcatagccagcaacaatgctaaatacaagactaactgtaaacctggaaagggaaggtgctccactgggtggaatcttacctaaacgttgaggtaatttcataacccggcacttccttcatcacacctaacttcatttcactccatttctctttacgccgccgtgacagataaagccatgtcctcactgaaccccattgcccagcatccccttt

SEQ ID NO: 170 - DNA, 416 bp, Bos taurus
  Clone ID: 21-BOVMS1-019-Q1-E1-F1
ctttatattttacataatagcatgtttcgttttgattaaaagctaccaaaggaattttgatcatggtgtaagtgttgaaagcaatattttctggaatataccaagtttatatcatttgatttttgtgctaaattattaaaagattctccctttttgaaacatgcgtgtttaaaatatgacatctcacgggtttccagatgaaaaccctcgctctttgcgtgtcttctttccctctttgtacattttcagttgtgagttcatcacacgtggttcatcagagaccagtagccttcgcttcttacacttttaagttcaatgtctctcaattgttgatactgtaatttaatgtagacttactctgaataaaagtagtttcaattggcaaaaaaaaaaaaaaaaaaaagggcggccgctct

SEQ ID NO: 171 - DNA, 437 bp, Bos taurus
  unsure (430): Clone ID: 21-BOVMS1-021-Q1-E1-F9
gcacaagcctttgtgcaatcaaaccattgttattggtagttctgtaaaggaaactgtggaatctaattggcagtggagtcataaatctatttactaagtgcggcttccaagaaatgttgcaattcaaaatgcactaagaccgtgatttactggagatttggagattctaaataatactttttaaaaacctttccatgcaacttctggtttagcttttggcaactcaacattaaagaaaaaaaaaacaaaccagcccaaccaagtttcagaattaagtattctcctagtaagtgattggaacttgtaatatttgccacaggactgacttatttatttactagctagaggctcttaagttcacttgtttatcagggcatatacagaagggtttgttaaaactcgacattgactttacaactttctgacctgntgcatga

SEQ ID NO: 172 - DNA, 301 bp, Bos taurus
  Clone ID: 22-BOVMS1-004-Q1-E1-F5
tcgaggaaggatttctctatgtgatgatcaatatgatacattgctgcgcatgtcataccgtcctgacatctactcagaatcattatttccagctcagccatcatacgatgcacttcaccacactgagaagcatccactgtctttttgcaccaccaacactgcatatggcattcagtgtagtgcagcatgttcagcgtcttccatttcatccaagctcaaagctttcactggatactttgacgggtaacgatgacagcattggctttgcagatatgcttaatgacccatcaaagcgtgcact

SEQ ID NO: 173 - DNA, 385 bp, Bos taurus
  Clone ID: 22-BOVMS1-005-Q1-E1-F5
taagatctcattcttttatagactacaactagtataaaactgttcacagcatgaagttacagcatgagtaggtacaaatgtgaaaaggaacattttgtgaaatatcttagaaaataaggacatttcaaaaggaaaaaacaattaaaagcaaattcctatatgcttctacattctgtacaagtggtcctaagcataggtgtgattccaacaacatgtttgtactagccctggtgtatgaaatctctccctgctttctgaagttgaagttcgctttgctgagtatttataagtcccttagacaacctgatttttcttttaccttgacctctttgataccaaaataatacagactgccaaattaaactttctacatcacagacttaaa

SEQ ID NO: 174 - DNA, 461 bp, Bos taurus
  Clone ID: 22-BOVMS1-008-Q1-E1-F5
agccacgacctgctgctttctcatctcctggaacgtcccgggagagaaggttttgtcggcttgtgcacggttctgttcatttctgctgtttacttaaatctgatgtgtggtcacctacagcgtgcggtcctggccggaggaagcacacgtgtcacatctcgaggaaaagaaaacaacagaattctagagaaaatgtgtttattttgatagcaatacatcattcatgtcatttttagtcttcctaaacctgtaaaaggctgtttaaaatttagcgatttgaaggcattatacctaagaaatcacttaaacatttttaaagctactgagatgaatttatttatgcacttcagaggtgctaaattttaaaagctgaaagacaacagaattctaagaagtatagtcaaaaatgttgcatgggttgcagtaatcagtgtttaaaggattcagtttcattgctgacg

SEQ ID NO: 175 - DNA, 460 bp, Bos taurus
  Clone ID: 22-BOVMS1-008-Q1-E1-F9
cgggccgacccacgcgtcgagcaaacgagggattcttcatctggtcatggtagaggagttcattcaagaggtcgaggtgcagctcacggccgaggcaggggtcgaggccgaggtcgaggtgtgcctggtcatgctgtggtggatcaccgtcccagggcattggagatttctgcatttacagagagtgatagagaagatcttcttcctcactttgcgcaatatggtgaaattgaagattgtcagatcgatgactcttcacttcatgcagtaattacattcaagacacgagcagaagctgaagcagctgcagttcatggagctcgtttcaaagggcaagatctaaagctggcatggaataagccaataactaatatttcagctgtcgaaacagaagaagttgaacctgatgaagaggaatttcaggaagagtctttggtggatgattcattacttcaagatg

SEQ ID NO: 176 - DNA, 436 bp, Bos taurus
  Clone ID: 22-BOVMS1-012-Q1-E1-F5
ccgaaggacagcatcagaattaatgtaactaccctggaggatggggaggtgtctaaagaacaggttgttcttaacataacctatgagagtggacaggtatatgtaaatgacttccctgtaaatagtggtgtaacccgaataagctgtcagactttgatagtgaagaatgaaaatctggaaaacttggaggaaaaagagtattttggaattgtcagtgtaaggattttagttcatgagtggccaatgacatctggttccagtttgcaactgattgtcattcaagaagaagtagtagagatagatggaaaacaggctcaacaaaaggacgttactgaaattgatattttagttaagaatcaaggaatagtcagacgttcaaactacaccctgcctttagaagaaagcatgctctactcgattttccgagacagtgaca

SEQ ID NO: 177 - DNA, 417 bp, Bos taurus
  Clone ID: 22-BOVMS1-013-Q1-E1-F5
gtgatgggtagattttattaagataagagttatgtgtgaatatctttaatccatttgattaggtttctaaatcttcagtctaagaaagttgaaatgtcatagaatattggttttaatagagctgaacagttatgttcaaaatgtgttcaaacagaaagtatgtttatattcagataaagggaatttatacttttcagttaagcctcagacttaggtaaatgttaagggcttatcttccctcattatcattaatattaatgaactcttggattaaattcagtaatatatttaatatgcttaataagcaaaaataggacttcaaatattccttccagtatttaattcctatgtggaaaaattgaattggtataaaaagttaatgatatatgaataattcttttgcactctcccaagtgt

SEQ ID NO: 178 - DNA, 457 bp, Bos taurus
  unsure (449): Clone ID: 22-BOVMS1-016-Q1-E1-F5
ctcaaattagtaattttccaaataatgcattgattaaatataatgttggcatttcttgttcagcaagtttaaaggctattatctttaaagtctcttaattattcagagactaattatccaggttagactgaccggttcactgctcactagcaacttcttaaaggggtttgagtagtaagaaaggaaatgtgtgttttttttttaaaaaaagctgttttgtggctattcagtgcactttgtatgtgcctaatattaatagaatgaaaagtctgaacaaattttataaacattctcgctgtgaaggagcttgctactgagtcacagaaatcccttaacattcattcaggttttaaaatgacaaattctcataggacctcaggcacagagtattgaggatgggtaaagggtgtgagtagatgtggaaaaaaggaaagaaaaaccactctgtnttctgcaa

SEQ ID NO: 179 - DNA, 378 bp, Bos taurus
  Clone ID: 22-BOVMS1-018-Q1-E1-F5
tggaaacctgggtttgtctgactctagagtcatgactttcaggcaaaatagttattaaggcaaggcaaaaatacaagcaaatgattagttatagggagaatgcaggcttttggtttacagaatggaacttgctaaaggcatttagaccactgaaaagtccttttgacaggatacagctgaagagtgactttcttagacaaaaacagaagtggtgtaacccaatatagaaaatctgtaattatgagttgttacggagaatttatcttacaaaatgattcttagttttaagaatgtaattcacaattaagttatactcagcagtagtggtacattttaaatgattttatttaccaaaagaaaagttacacgtgtaacttt

SEQ ID NO: 180 - DNA, 403 bp, Bos taurus
  Clone ID: 23-BOVMS1-002-Q1-E1-F3
attataccagcgtcaaatgtgtcatccgatatcatcgtcataagctgcaccagtaccacacaagttcgtagaagtgaggtagagcaccgtactcatggaaacgaagaagatgacatattgaactcaagtacagcttttgaagatagccattcctttaataaaaattatactgaggatatttttccaatgacaccaccacagttacaacaaaccagtatatatgacaagataagaagacgtaagcaagtgctgagagagagagaagcagctcttgaagaaatgcgtatgaggatgcatcaactctaataacatggctgttcataaaggcatcaatgaaatagctatgtgttttcatatacctatgcattgtgataaggcattctgaaagtgtctttgaatgtaa

SEQ ID NO: 181 - DNA, 421 bp, Bos taurus
  Clone ID: 23-BOVMS1-005-Q1-E1-F3
gaaaatcataaatttctatttcatctgcatagtgtatatttcatattaaaacatgctaaagagatggtagagatatgagaatacccgggaagttagtgaaatagcaattttagttaaagtgtactagtgcatagtatgtttcatgcatttttactgtttttggactatactatgtttcaagtatctatatgaacccttactaaaagtattcatatatttttgaaggtctagattcttcgacgaatgtttatgcttctaagttttggcctctgtaattgattatttctatattgttgacattaatacaaaatatgagtatggtttagaaaagagcagctcatatattttttgaaataaagatgactgtcattcaggaaactcactatgttaaatgtttacttatcattataatgatcaattc

SEQ ID NO: 182 - DNA, 269 bp, Bos taurus
  Clone ID: 23-BOVMS1-013-Q1-E1-F11
ggtcgaccgacgcatccgtccgaagatgcgtgggaaattattggatttcagaataaagatcgtagaacgtgaggattaatttcatcgatcatgaaaaatatgagtttttgtcgtcccgtactgcgtaattgttatcaagtaacaggtaatattttgtatcctgggtggtgttccagaggattacgtccttcggacgtgttgatgcagtgcacctactttgtaatatgctcctgaagagtgaatgtatcgtagctgattttgtactgcct

SEQ ID NO: 183 - DNA, 88 bp, Bos taurus
  Clone ID: 23-BOVMS1-013-Q1-E1-F3
ggggtcaactaacccttagctgctctggcctgtaaactgtccggcgagcgtgatgagagccgcgatcatctcgactctcacactatat

SEQ ID NO: 184 - DNA, 398 bp, Bos taurus
  Clone ID: 23-BOVMS1-018-Q1-E1-F3
cttattattttttttgcttccttaagagtcagaacacagagacacattctggtaagcagaaccttggccaggaatggtatgatcattacagagaacaggccattgttcgttttgagggtcgaactacaattggtggccgctgtcacacagatgtgttggattttggtccaacctcttcacctgaaaaagccagtggagaaaagttttgttttgtaccacatgcaaacgtgtagcagccttgaccttgaaataacacgtgggcagcatctgatgttctttcagagcagaggtataaatgtaggcctgttacacttgtttaacgcagtttgcataacaatcagtgtaggtcagttaatacagaaacacgtgaaaacatttagatagggcttactacacac

SEQ ID NO: 185 - DNA, 359 bp, Bos taurus
  Clone ID: 23-BOVMS1-019-Q1-E1-F3
gtgaaatgctgcaagatgatgtatagtcacttgggaattattaaaggtatattagttattcccttgtatcttaaaaggaatgagcagcatgagttctcaatcttgtgatgagaagagcaagctcttccatatgagaaagaaggtggaatgaaatgcatcttcctttatttgcaacgttcctgaaacttttcctgatctggttttggttttcatgacttctgtccttttttcttccaaacttagaggttctctcacccaggtggcatcagagtcctctgtttgcaggcctccgggaacttcctagactagttaaaatcacaattgaagttgcattgcttgctcaggtgatagtgatttag

SEQ ID NO: 186 - DNA, 448 bp, Bos taurus
  unsure (410),(436): unsure at all n locations; Clone ID: 23-BOVMS1-022-Q1-E1-F3
ggctcatcgaaaactcgtggaagagcaaaatgcagagaaggcgaggaaagctgaggcgatgaggcggcagcagaagctcaaacaggccaagctggcagagcagtacagagagcagagctggatggcggtagctgacttggagaaggagctcagggagatggaggcgcagtatgaaaagcagtttggagatggatcaggtgaagacgaagcggaagaccaggagctcagagatggacaggatggtaaagacagtgacgaggccgaggacgcagaactttatgatggcctttactgccccgcatgtgataagtctttcaagaccgaaaaggctatgaggaatcatgaaaaatcaaagaagcatcgggaaatggttgccttgttaaaacaacagttggaggaggaggaagcanatttttcaggacctcaaactgacganaacagtctgaat

SEQ ID NO: 187 - DNA, 117 bp, Bos taurus
  Clone ID: 24-BOVMS1-002-Q1-E1-F7
acaagttcatatccgcaactaacagtgaccttgtgctttaaaaccctctgtccccggactggcccttgaccactacttagaaaacaaagccaataaaagtgacttttttttcattat

SEQ ID NO: 188 - DNA, 420 bp, Bos taurus
  Clone ID: 24-BOVMS1-003-Q1-E1-F7
ccagattcctaatagcgcttggagctggacatcattcgacaccaaccaatcacactgccgaacgccctctgaggactcaagatacacttacactgtatatcccttaagctgtacctctctctctaaggctgctcttgggaaacaagaaagtgacttgtgaaaagagaagtggcaccaagctccgtgggactgaatgtccatattattcccctagttgggcttagggcacagagcctcagacccatagtctgaacagatcgttgagacatgtctacaaatgcatctcatgttaagttgggattttttttttttttagacaacaacactaataaaataggtggcatggtcatatttgcaagatgtgttgtggttccactgctgtccctaaggaattataaaacgggttatcgcacaatagga

SEQ ID NO: 189 - DNA, 55 bp, Bos taurus
  Clone ID: 24-BOVMS1-004-Q1-E1-F7
aaaaaaaaaaaaaaaaaaaaaaaaaaaaaaaaaaaaaaaaaaaaaaaaaaaaaaa

SEQ ID NO: 190 - DNA, 447 bp, Bos taurus
  unsure (403): Clone ID: 24-BOVMS1-006-Q1-E1-F11
gaataaacaaagatctgagaaagctgtatattacactttgtcgcaggtagtcttgctgtatttggggaattgcaaagaaagtggagctgacagaaataacccttttcacagtttgtgcactgtgtacggtctgtgtaggttgatgcagattttctgaaatgaaatgtttagacgagatcatgccaccaaggcaggagtgaaaaagcttgcctttcctggtatgttctaggtgtattgtgaaatttactgttgtattaattgccaatataagtaaatatagattatatatatatctatatatagtgtttcacgaagcttagcccctttacttcccagctgccccacagtgcttgatacttctgtcatgggttttatgtgtgtagtcccaaagcacataagctanggagaaacgtacttctaggcgcactaccatctgttttcaacacg

SEQ ID NO: 191 - DNA, 439 bp, Bos taurus
  Clone ID: 24-BOVMS1-007-Q1-E1-F7
aaaaacttttgaaagtgagcgtgctcaacttctacaagaggagactgcaagaaatctcacacagtgtcagttggaatgtgaaaaataccagaaaaaattagaggttttaactaaagaattttatagtctccaagcctcttctgaaaaacgcattactgaacttcaagcacagaactctgaccatagggcaaggctagacacttatgagaaactggaaaaagagcttgacgaaataataatgcaaactgcagaaattgacgatgaagttgaagccgaaagggttcttttttcctatggctatggtgctaatgttcccacaacagccaaaagacgactaaagcaaagtgtccacttggcaagaagagtgcttcagttagaaaaacagaactcgttggttttaaaagacctggaccatcaaaagaaccaagtaacacagctt

SEQ ID NO: 192 - DNA, 431 bp, Bos taurus
  Clone ID: 24-BOVMS1-008-Q1-E1-F11
agtaatttttctgcttccaaaatttttatttctgcattagccatggaaggacagcaacttctagtagcatatccctgtgctttgttatacggagtcttcgccctaatttccgttttttgaactgaatttatctgggatgtggacatcattgggccaaataacaaaaaggactttgaactcttcaaccggaccagcaaatggctacagtgcaactctcatgcagatctaatgtttgactcttggagcagtggaagtaaagaagtatcttttgttcatttttatagaacttttgaatactatattggatttatgcagtatgactagatttaaaaggtgtttgtgcttatgcaaataagaagtgctatttctttcctgttcctgcagccttgggaaacaactatttcccttgctaattgtatatcatggtgttt

SEQ ID NO: 193 - DNA, 183 bp, Bos taurus
  Clone ID: 24-BOVMS1-012-Q1-E1-F11
cccacgcgtccgaaataaaaaaatacaaaaaaaagaaaaaaaacataaagaaaaaaaaaaaacaaaagaaaaaaaaacaataattgtcataaattacctgcacatataaaatccaaatataacgcaacagtttgtccgccaaatagtgtactcacattatcaatctctttccaaaatggggga

SEQ ID NO: 194 - DNA, 56 bp, Bos taurus
  Clone ID: 24-BOVMS1-012-Q1-E1-F7
aaaaaaaaaaaaaaaaaaaaaaaaaaaaaaaaaaaaaaaaaaaaaaaaaaaaaaaa

SEQ ID NO: 195 - DNA, 62 bp, Bos taurus
  Clone ID: 24-BOVMS1-013-Q1-E1-F7
aaaaaaactcatgctaactgatggcataaaaataaaaagaaaaaaaaaaaaaaaaaacaaaa

SEQ ID NO: 196 - DNA, 250 bp, Bos taurus
  Clone ID: 24-BOVMS1-014-Q1-E1-F11
ctgcacactctcatgatctgctatttgcggcaagcagctatgtgagcacagctatcatttttatttcccttgtgcctactcaagtggataatgtcttaggtagtagtgggaaataagatatctgtcatatatagtggctcattgtttaaacacacttgccgtcaacttgatggtgtctctatacatgaactctgacataacacatcttaagagacgtgtaacacaattccctatcatcaatcacccatgt

SEQ ID NO: 197 - DNA, 286 bp, Bos taurus
  Clone ID: 24-BOVMS1-014-Q1-E1-F7
cccaagtgtagaactctcctttctgtctttctgctgcactaattgcacggggctggcagaggaggaggaagtgtcagttcacaggagacgtggccggtgggtgcagcgaatatcacagcgtgggcttctcaccgcttagagtgtcgctgtcccttcatggcagacaccgcactgcagacaaagcgcagctcccacagtaaaaagtacatatctttttgaaagtgctgttattgagaaattttgattaccaaatacatcgtttatgacttacactgtagtggtgtgt

SEQ ID NO: 198 - DNA, 384 bp, Bos taurus
  Clone ID: 24-BOVMS1-018-Q1-E1-F7
tttagatttctacttcgtatctactcagtagacactgaggtgtacttcagtgttgcacataagtgacctcaaagcacagttggtcccaaagccttttcgggccttcctgttcttgtcttcagaacatcataccactaagtagcagcttatcttcagaacattcacttaattgcaacattaaccatgttcacatactttctgagaactcactggtggtaatttcagataacatacacctggaggcatttaaccatttgtaacattaacatgttattagaactcaattattggattttcttcagtgcaaggctttggttgcggaaatatattgattcatgatccttgagttctctagggaacaaaaattcctctaatgactgttgc

SEQ ID NO: 199 - DNA, 111 bp, Bos taurus
  Clone ID: 24-BOVMS1-019-Q1-E1-F7
cgaacaggctcccctccaaaaaacacaaaaataagaaaacaatacaaaaaaaagaaaaaaataaatgaaaaataagagaatgccaaaagaaaccaaaaaaaaaacacaaaa

SEQ ID NO: 200 - DNA, 413 bp, Bos taurus
  unsure (279): Clone ID: 24-BOVMS1-020-Q1-E1-F7
gcatctaaaattactcacagctcagcaaagaccattatgatggtaacagctcatttttttcatatagttttttttaaattcagttattggatgatattaaattacagtggcattcttaaagacttcttcaaaaagcaatcttacatgaaaaatgtataaattatcttttgatatgctgtttcccaaggttctgtgacactggagggcagctgtcctgtgcggtgtttttgtttccagcaccgaagttatgagaaatattgtgtagctgctgctcagtcncaggtgcattctgcccctgcccacctcatggtccccccttcaaagattgtgcagctccttaaattataaagctggaaaatattttagtcatcaaatttgattacagaaatggtaactttgaaatgcaaacaggc

SEQ ID NO: 201 - DNA, 447 bp, Bos taurus
  unsure (421),(434): unsure at all n locations; Clone ID: 24-BOVMS1-021-Q1-E1-F7
ccgagatggaaataaatacccatcccttctctctggctcaagaactagggcatggcttttatatttcaagagatggcagctatgagtgttaaaatgactatcagttcattctcttacacatgcatgaggtgcaggctgttgcacagttaaaacatcattcattgttcatcactctccacttgttccataaatgtttatgacatgaaagcagtttctggcatctgaaccagagggattgttttccagcatcaactcaaaagacattaaaatccagggaggaggggaagaggagaattgtcgtcctttggaggcttggattagacgttcccccagccactagtagggacataagtgacccctttaaaacttttatcaggcctgaaggggatccttgttctgattaataaacaaagcctcctanagaaactatttanataaaacgccttc

SEQ ID NO: 202 - DNA, 272 bp, Bos taurus
  Clone ID: 24-BOVMS1-023-Q1-E1-F7
acgctatcgtaagcatgtcctctgcagatccagtgtgaccttattccatcatttagaatcatctacagttgtcatggtagtgtcaatacatgcatcaagacttcctatacatacttgtcgttgggagtgtgtagagctttttttttttatggaagacatgacacagatttgatcatcttacatcaagatatgttgcatacatctgttatggtctctctgggccatgtttttctattggtttacggtacatgtgtaactatgatattgcatta

SEQ ID NO: 203 - DNA, 337 bp, Bos taurus
  Clone ID: 25-BOVMS1-001-Q1-E1-G1
aaaaaatcacctagaaaaagaattcaattcactggaaaaagatataaggataaataaaaccaaggattagttacagagcagttgtttggccatcagaccttgttctgtgccattttctggaaactaacgtatatcaatataacctgttcaacaaaaatgtggggggaattgcatatggtactgggctcgtctccactgtgacgaatttacttggcgcacacgtgactgccacagatttaactgagttacttggtaacctgcagtattatatttctcaaaacaccagtatgaaaactaatcatctgcctcaggtcaaacagctctcctggagtgtagc

SEQ ID NO: 204 - DNA, 429 bp, Bos taurus
  unsure (367): Clone ID: 25-BOVMS1-005-Q1-E1-G1
cagaaatactctacctctgaaaaaaaaaaaagaatcacagaagtccccttatcatttttatagagagtgacagaccttaaactggcagtgttctttctgtacatcttataagctttgtcagtgaagcagtcttttgcaggagcttcctttcctagttaggatatgtttcagacagagctggctgatatttccctcagactgctccatcttccgccagggagcagtaagagaccatgacgatcagaacgaggacaggctggagtttcactggcttatctccaacaccactgatgcgtctttcagagaggaaaacaggtactagtcttcatagttaagaatatcggaaatccatagctgcttttgtgtntgtttgtgtgtttcactgaatcaacaataatgccttgctcaatcaatgcattcagccatctc

SEQ ID NO: 205 - DNA, 109 bp, Bos taurus
  unsure (8): Clone ID: 25-BOVMS1-007-Q1-E1-G1
ggtcgacnacgcgtccgtgaaacagctttctaaatactgttttatctgttttttctgatgggaatactaacatggtatagattatctgagtgttccttagttttatgtc

SEQ ID NO: 206 - DNA, 279 bp, Bos taurus
  Clone ID: 25-BOVMS1-008-Q1-E1-G1
ggaagagcaaattgcatgcacgaatggttggatggggttgaggttggtctttcgaactgagtgtatagcgtattcacttgcctagaacatctatctgaacctaagtttgaatgagactccacttaggcaactcactctagcaatttggtagccagcattgtttttcaaggtgggaatcgatgagtcaaatttactatgacgtttgacatatacacagagatttggtctaagacgatcacattttcagtgttaagttgaccataccttaagatttagaag

SEQ ID NO: 207 - DNA, 138 bp, Bos taurus
  Clone ID: 25-BOVMS1-010-Q1-E1-G1
cggtccgccagccgggtcgagcacgcgtccggttcaagatcgcgagcggccgccctttttttttttttttttttttttttttttttttttttttttttttatctctatttgtagcgctagaggatgcactcttagatc

SEQ ID NO: 208 - DNA, 71 bp, Bos taurus
  Clone ID: 25-BOVMS1-011-Q1-E1-G9
cggacgcgtgggaaaactggtggatttgccccataattatggagatgaaccgataaaatttcaaaatcaac

SEQ ID NO: 209 - DNA, 414 bp, Bos taurus
  Clone ID: 25-BOVMS1-012-Q1-E1-G1
cgttattaagaaagattggattttcgtacctacagaaacctagacccaagttactattttttaaaaaattgttttgttttggtatttactcctagttcagattagtggttagagaaggggcctccttattcccattttcatgacgacctagtttctacttaattgacctaatgaagtcataaatttataatgacttatgaattatagtaaacaatagaaactacccacttttgtattatactatcaattagaacacaatgatgagatatgaaaatccaaatttaaaatggcttagaacatattcagattatcttcatatttctaaatttcatcgtagttctcagacaatattataggttaaaattataggtgactcatacatctcttaaagtttttcaaagtctcaatttccct

SEQ ID NO: 210 - DNA, 398 bp, Bos taurus
  Clone ID: 25-BOVMS1-018-Q1-E1-G1
accaacgcgtccgccgagagatcacaatgagccaagcatatcagaacatgtgtgctggaatgtttaaaaccatgggagcttttgacatggatggcaaagtacgaaaacccaagtttgagcttgatagtgaacaagttcgatatgagcacagatttgctccattcaacagtgtaatgacaccaccaccagtgcactatctgcagttcaaggaaatgtctgacctcaataaatatagccctcctcctcagtctccagaactgtatgtggcagctagtaagcactttcagcaggcaaaaatgatactggaaaatatcccaaacccagaccatgaggtcaatagaattttaaaggttgccaaacccaactttgtggttatgaagttattggcaggaggacac

SEQ ID NO: 211 - DNA, 438 bp, Bos taurus
  Clone ID: 26-BOVMS1-003-Q1-E1-G5
aatgaatacagaaaaaaaaaggtactttttctggctattttataggtctgtttctcttgaataggttattatcattacttttgattatgtgtatctatgggtatgacacaatcaggcaatatacatttattattctctttggcaaaaaaatcatgtgaaagaaacctggttttatgaaaccaaagactactgcatttcagtatatatgcgaataaagggaattgacatgtcacatatcgaatgaaaatttcactctatgttgaaacttaaattataccaaagacccttattagaaaataaacaccttaaaacaaagggaatacacaaaaaaactaatagaatgatgctgttttacactaaaaattatttcataggcattccaaacctgggacgaggaacagagatcagctgtttcataatagtatacatactattttt

SEQ ID NO: 212 - DNA, 319 bp, Bos taurus
  Clone ID: 26-BOVMS1-004-Q1-E1-G5
aaaaatgcaattatgattggttttctgaagatgggatactgtgctgagagtatctattcttgtcaattcatacgtctgatatcgttgttctcatcctccgcctttcacattcatgtcatatgacaatcgtgttatgtctacaacacagttaaaatccatgggaaaggaaggataatccctttctaacacatacagttctgcatttgtgctcctgactttctcagtctagaaagagtttatcttcccacattcatgcatgctgggtgaatgaaaggaaagcactttgtaacttacacatggaatttctccatttcataga

SEQ ID NO: 213 - DNA, 58 bp, Bos taurus
  Clone ID: 26-BOVMS1-005-Q1-E1-G5
cattaccccgccccgggcgggaggcgcggccccttctggggatgtgtctggaaggaat

SEQ ID NO: 214 - DNA, 63 bp, Bos taurus
  Clone ID: 26-BOVMS1-010-Q1-E1-G9
ctgtagtgaactcttgtcgttttgtatgagcaaaattgtctttactaaacagatttaatagtt

SEQ ID NO: 215 - DNA, 380 bp, Bos taurus
  unsure (288): Clone ID: 26-BOVMS1-012-Q1-E1-G9
ggaaaagccaaactaaagaaaataaagttgggacttctttccctcatgagtctacatacggtgttggcaactttaatgcttttaaatcaactgccaagaattttagtccatcaacaacttcagtgaaagagtgtaatcgctcaaattcttcttcacctgttgacaaacttaatcagcagcctcgtctaaccaaactgacacgaatgcgcacagataaaaagagtgagtttttgaaagcattgaaaagggacagagtggaagaggaacatgaagatgaaagccatgtanggctcagaaaggatgacgactcattttaatttgcataacagcaatagtactcaccaagaaagggatataaaccgaaacttcgatgaaaatga

SEQ ID NO: 216 - DNA, 438 bp, Bos taurus
  Clone ID: 26-BOVMS1-016-Q1-E1-G5
aaggcttctctcctgtggtagctttctctcctttctcattcctggccattgccacaaaactgtcagaatttatatgacttactagagcccagcactgtcttcctgcctgcttcccctcctatgccatcttatacatacacactgtaaacagaaaacgctttcttgggtaattaggcttcaacttagatattttcatttggatgaaagatgatcatttaagtaactttgtaaatctgagactttgtaagcctaaaaaaattaagcttcactgttttgctttgtatgttatggttttttaaagtgaagtcctaaaatcagtcaaaattgattgtactaaaactcagaagaaattacacaacacgtacaagaaagtactgcttcacatagcaagtaagttgatgaagccaagtgatggtaaagaattagaaattctaaaaa

SEQ ID NO: 217 - DNA, 440 bp, Bos taurus
  Clone ID: 26-BOVMS1-017-Q1-E1-G5
ctggcagaggaggtagtagttacgtaaaccaactcagtgcggggtatgaaagtgtagactctcccacgggcagtgaaaactctctcacacaccactcaaatgacacagactccagtcatgacccgcaagaggagaaacctgtgagtgggaaaggtaaccgaactgcggcctcccgccacgttcagaatggcttggactcaagtgtaaatgtacagggttcagttttgtaaaaaaaaaaatttccagcaaatttttatacagtgtcatttaatttggaagaggatactgtccacttaattaatgcatacttttgtcacaatttgccttttttgtgggtggttttttttttttttttccttttttctttgcttcaatacctctgccactttggaaattgtaacagttaattactttgaatgttgctaaaaggacattttgtg

SEQ ID NO: 218 - DNA, 218 bp, Bos taurus
  Clone ID: 26-BOVMS1-018-Q1-E1-G5
acgcgtccgattatctctctaattctgacattgactatattatataaacacctatatatgtctagtacacaccaaatccttcattttcatctcttacacaaccacactaagttatcataattgaggggctggggtttttttgccttcttctatatttggtcatattattacacagatatcatatttaatatttgattatcacttttgtatgccatatc

SEQ ID NO: 219 - DNA, 69 bp, Bos taurus
  Clone ID: 27-BOVMS1-008-Q1-E1-G3
gttacatacccattgtccttgagttagtcccactaaagtactttgaaaaatgatctgcgtcaatattat

SEQ ID NO: 220 - DNA, 462 bp, Bos taurus
  unsure (428): Clone ID: 27-BOVMS1-012-Q1-E1-G3
gcaagatgctgtcaccaatgtggagaaacatttcggagagctgtgccagatttttgctgcttacgtgcggaaaaccgcccgactgcgagacaaagcggacctcctggtgaacgaaatcaacgtatatgcctctaccgagaccccgcacttaaagcagggcctgaaaaactttgctgacgagtttgccaaacttcaagattatcgacaagccgaggttgaaagacttgaagccaaagtagttgaacctttgaaagcttatggaaccattgtaaaaatgaagcgagatgatctcaaagcaacattaacagcaaggaatcgagaagctaaacagttaactcagttagaaagaacacgtcagagaaacccatctgatcgacatgttatttcacaggcagaaactgaattacaaagagctacaatggatgctnaccgaacaactcgtcatctggaggaaactattga

SEQ ID NO: 221 - DNA, 261 bp, Bos taurus
  Clone ID: 27-BOVMS1-013-Q1-E1-G11
gtgaaatacgtccatggaatgttcctttctttccttaatgcacgtttatggttctaacatcgctccagtatgaatgggtcagtatgattatggtccacatgcggtttatggtataccatcgccctgtgattacgtcctgtcgtaattcagtcatctgcatcaccatggagggttacgtttggaagcacatctagtccactatcattagtgagtcatttatgtacattttgaatcgaaatagtgtctatcgaattgtctcaa

SEQ ID NO: 222 - DNA, 463 bp, Bos taurus
  Clone ID: 27-BOVMS1-013-Q1-E1-G3
ctacatttaaatgaatcattgagaattagtgtgatgctaggttctgtaatctcagtttttctagctcaactttttgtccaagacctattgagaaaagggattattggaactagaaccacttgattagaatataagcaatgattttaaagcattattaatgtctgataactgacatacattcaaaacactgaaaccttgatgtttgtaaccccttcgtattctggaatgatgttgggatcagaatagtgatacctaatatgataatgtgcagtgatacttagctttgtgcgtgactttatgttttcagtgtactgtgtacttacagaattgttaaagttgttatttccaatatttatactacaaaaattgtatacacaccttatgattataaccagcatttttaataacatttgcacttactgtaatgtaatagacttcacttttaacacaaaagttttaactg

SEQ ID NO: 223 - DNA, 75 bp, Bos taurus
  Clone ID: 27-BOVMS1-016-Q1-E1-G11
aaaaaaaagaaaaaaaaaaaaaaaaaaacaaacaaaaaaaaagaaaaaaaaaaaaaaaaaaaaaaaaacaaaaaa

SEQ ID NO: 224 - DNA, 57 bp, Bos taurus
  Clone ID: 27-BOVMS1-019-Q1-E1-G11
aaatctctaagggaagcatggccagcatagcaaagcaaaaattgccaaaacagaaaa

SEQ ID NO: 225 - DNA, 322 bp, Bos taurus
  Clone ID: 28-BOVMS1-006-Q1-E1-G7
ggagcacccctgggcctactgtgtctagctctgcacccagtgaaaccacgagcccaatatcggaatctggacccaaccagcagttcattcagcaaatggtgcaggctctggctggtgcaaatcctccgcagctgccaaatccagaactcagatttcaacaacaactggaacagctcaacgcaatgggcttcttaaaccgggaagcaaacttgcaggctctaatagcaacaggacgcgacatcaatgcagccattgagaggctgctgggctccaagccatcgtaattaaatttctgtaactggaaaaaatgtatcttattttt

SEQ ID NO: 226 - DNA, 215 bp, Bos taurus
  Clone ID: 28-BOVMS1-007-Q1-E1-G7
gatagatatcggaagtgatgacatcatcaggatcggagagattgtgccagtctgactcactctcggtctgctcatgaacaatatggacgacctgatcgttcactggatcggaaaggttggctactacaatgtcaagatgaggcagtctgccatagttgtatgtgagtctgggaacggctcaagtatcgtgcatcatgtccataatcaaaatgttg

SEQ ID NO: 227 - DNA, 434 bp, Bos taurus
  Clone ID: 28-BOVMS1-010-Q1-E1-G11
cccaagcgtccgttctctttctatttattgtgtcgactcgtggcttatgattaaaggcaggcaaagtttgcagactctaaacccttaagagctgtcttaaggacatttatttttttccctttttaagtaattttacactttttagtatctatttcagagtcatatttaaaactatttattagtgaataccgtacatgagacaccaaggttactgagatgacaattcttcaacgttaatgataatgtggtttatactgtgccttaatagtaatgctatttaagatatttatttttaagttttactatgctgcactctaaagaaaggaactttagatgtgacactgtaaaattatgtattcatctcatggcataaattatttagtaggtctagatgtaacatattaaatattaacctattcaactaaagatgttga

SEQ ID NO: 228 - DNA, 479 bp, Bos taurus
  Clone ID: 28-BOVMS1-010-Q1-E1-G7
accggtcggattctccgggtcgcaaccacgcgtccgaattagtagtgcggtatacacccaaggtcttggaagagatggagtcgcgctttgaaaaaatgcgatcggcaaaacgcaggcaacagacctaatggccgttaaaacctttatattccattttgcttttagctagagaagttttacttgtgacctactgatggccacaatgccaatgattgtaaaaacaacaacaaacttcccgtgaaatcctccttgccattttataaatacctattttaacatcatttatggttccagagatgcatacacttttttctgacaagaataagtaaaaaggtagtgagggcagttctgtcctgctgtttttacaggcctttttcaacaaatgcagattttgtcaaaaagttgttatagatttttaaaaatgcttttttaatattaaaatgtacttttacattcgtaaatctttttttaaggaaaaa

SEQ ID NO: 229 - DNA, 131 bp, Bos taurus
  Clone ID: 28-BOVMS1-012-Q1-E1-G7
cgcaaaagctgaggcaggccctcggccgcttcccggtgatgtaggacaggtggagtgaacgtggagaaacgccgaagtgcttccttctgacttgggacaacgcaattggatttttttttccaccatcgtcc

SEQ ID NO: 230 - DNA, 376 bp, Bos taurus
  Clone ID: 28-BOVMS1-014-Q1-E1-G7
atcagtctgaaggatcggcatatgatcaaaactgatcttcgagatcatgaaatatcatagatcttgcatagagtaaggacatatcaagctgttggacgcagactaagcttgacaacacagagaacattcagtgttgaaacatctaaggggctctgcatttgctttgactaactgaagctagcataatacatactgtgctcgaatagatttttggactttacaatagttcagatgacatatgcaatacgaattttaatcaaccagcacattatacgatgctaatattctgtttacccctattgttcatactacaaatgacacagacctagtacaaacagcatttcttctggaaacggcaatggtaactcttcctgtt

SEQ ID NO: 231 - DNA, 442 bp, Bos taurus
  Clone ID: 28-BOVMS1-017-Q1-E1-G7
attatacttaaaatattttcagaatgtgggaaaccaatgaaatatgtgatctaatctagagttttttccttaatcatcatggtggtcctggctgagtaatttagttataaaaacaagataattctattacataaactaactgaagataataattagaggaaatagttactctattttaaacacgagaccttaaggaaagagaaattgtctttgtttttaatgagattaatccatttgtcttatcatgctagaattaaaagtggtttgactttatctaaattgatattaatttgtaactatttttatagcaaaacaatgacagctgttacaattgttgtgggtgttaacagttttttaaagaagggaatctgtttattgcttatcaaaacattttctaaagtgggggaagaaagtttacagactttccaagcacatttatgtt

SEQ ID NO: 232 - DNA, 442 bp, Bos taurus
  unsure (422): Clone ID: 28-BOVMS1-021-Q1-E1-G7
gtttcctcacgcacttaggaatccacgtcagaacgatacactaagatgttcatcagcagcacagcagtcctgggtacgctggggtcatgcatgccacacttcacacgagctcactacatttcattcatcaacccaacacctaccgtgtgtcaactggggaacttcatcattcggacaagaacaatatgatagcttatattaccagagcttcgggtaacacataatatcattgtccatgctaacaatgtaacaatgattgagatactcagattcgaataaagatcgtagtgctttgatgacagtattaatgataatatgtcaaactaaagactctggcggaacatttgcgacctagatagccattgcattatatacatttctctcagcagttacatctacgtactctcggagtcgtaccactnagcaagccccatgcatgctt

SEQ ID NO: 233 - DNA, 283 bp, Bos taurus
  Clone ID: 29-BOVMS1-001-Q1-E1-H1
aaaaacctccgccaattcttggcaagggctgccaggaacctgggaaaaccgcaactgtcacctgaatttggaatattattttgtaaaatcactaacccaccctcacttgatgaattggtaaaaaaggcaaaatttgtcctcaactgtgtaggccaataccgactttattggggaacctgtaataaaaccatgtattgaaaatggaactagctgtattgacatctctggagaaacctccattttctggaacctaatgtattggaaagtatcatttcaaagctgc

SEQ ID NO: 234 - DNA, 200 bp, Bos taurus
  Clone ID: 29-BOVMS1-005-Q1-E1-H1
cgggtcgacgacgcgtccgaaaaataaacacaacaaaaagaaaaaaaaaaatcaataaaaaaaagaaaaaaaaaaattcaaagaaaaagggaggtcgcacaaaagtgctcatgtctttaagtcactttaatgtaattctaatcggtcttctatactgtcacacatttcaatttcactggacttcgattcgctacatcttc

SEQ ID NO: 235 - DNA, 322 bp, Bos taurus
  Clone ID: 29-BOVMS1-005-Q1-E1-H9
gtccggcaaacacgggtcggccgacgcgtccggccttattaatcctgtttcaaaccctatatctaaaatctttccaaatcaagtctattttgctgcttttgtttaatttcctaaaagccatagcctttacatgttctgtcagcaaactatcaccagaagttgaaccaatgcaggtaggagaaaagctcccttaacaatgtttttagctaatggtatttttttcacacgtaccactataagtaattttacagttatatctctcacagtcatacaatgaatgctcatgattactctcatggaacagaatgtcacgggatacaga

SEQ ID NO: 236 - DNA, 72 bp, Bos taurus
  Clone ID: 29-BOVMS1-007-Q1-E1-H1
ggtcggttacccgggtcggcgcacgcgtccggacgaaactggtttaaaaattgcttaaccaattgcaaaggc

SEQ ID NO: 237 - DNA, 342 bp, Bos taurus
  Clone ID: 29-BOVMS1-011-Q1-E1-H9
tgttaatgcattagtcagaaaatgggcaaagggcatgaatgtataattaatagaaaaaagcaaatgatcaatcagagtatgagtatgaatacaaatgagtatgtaagttaaacttgaaaacctcttttataccccagctccttggcaaagcacttttaaaattacagttttcagcatttggtgagggtgaaatgaagagcggagcactgtgtcgaaattggtgcaaatttcactgagggattctagcagtgtttgtattcacaatcataaagtgttcataccccataactttggacccagtgggcgtatttcaagaatgtagtttaaagaaataatgaaata

SEQ ID NO: 238 - DNA, 114 bp, Bos taurus
  Clone ID: 29-BOVMS1-019-Q1-E1-H9
aaacataacagtaaaaccgtcactgtttactttaccatttactaccagtaacttttagttcatgttttataagaaaaatacacagtaaaaaggttttatcttttaagttacatt

SEQ ID NO: 239 - DNA, 51 bp, Bos taurus
  Clone ID: 29-BOVMS1-021-Q1-E1-H9
taaagttacagtcatcatcccaaaaaaaaaaaaaaaaaaaaaaaagaaaaa

SEQ ID NO: 240 - DNA, 306 bp, Bos taurus
  Clone ID: 30-BOVMS1-003-Q1-E1-H5
gaagatctgagatgacatggtattttgtactttcgtgaggcatatatcctagcaatacacgccaatactcgaaagcacaattacacccagataatggcaaaacagcaatatagatttcgccatgattttcctgacagtagggagtacgtgccattatacatgtgcgggattcttcagaagctttgctatatgtagtagatttaagatcggttcccaataagcaaggagatacctggttttgtgaattagaacttgacgacacgacggacatcagactgagtgtcatacacgtgaactacggcacac

SEQ ID NO: 241 - DNA, 463 bp, Bos taurus
  Clone ID: 30-BOVMS1-014-Q1-E1-H5
cagagccttttcaactgcaggatcttcaggttctgatgagtctcatgtggccactgcacctccagatatctgctctcgaacagtttggcctgatgaaactatgggaccatttggacctcaggatcagagattccagcttcctgggaacataggttttgactgtcacctcaacgggacggcatcacagaagaaaagccaggttcataaaactttacctgatgttctagcagaacctttatcgagtgaaagacatgagtttgttatggcacaatatgtgaatgaatttcagggtaatgatgcacctgttgaacaagaaattaacagtgcagaaacttactttgaaagtgccaaagtagaatgtgcaatccaaacatgtccagagttgctgcgaagagattttgaatcactgtttccagaagtagccaacaacaaactaatgattctgaccgtaacacagaaaact

SEQ ID NO: 242 - DNA, 410 bp, Bos taurus
  Clone ID: 30-BOVMS1-017-Q1-E1-H9
gtagggcaggctgaccctacaataatttatttgttagtgttaaagatgaaacgtcgtagccaactcttaaagtgttaaatagtgtagacattaaaagaaatttctttttaaaggcttaatttggggacttttttctgtttacaatgtatttatcacctcctttctttctctttctcaaaaaaaaaaaaaagtttggaattcacagaaacagagccagcaagttacaaaattttttgagttaatgagttagaaaagataattaaaaataacataaattctcagtgaatacagttgtaactcttatatgaaataggcaagtttacatgctggtgtttagaaaatggctaaaaaatcaaaaaccattgcattaatctgttttaagtcataccatattcagagttctgtgtttt

SEQ ID NO: 243 - DNA, 432 bp, Bos taurus
  unsure (386),(421): unsure at all n locations; Clone ID: 30-BOVMS1-018-Q1-E1-H9
aaagaatgtgtactgatgttcttgcattaaagctttacagagatttaaactaattatttttgtagttacttctaccaaatagcctttccttttcaataacattccttagtattttttatagctaagtacattgtattttcttgctgatgaactggaattggaaaaatagtacaagtggatgagttggaaattatgcactttgaaaacattcactttgtttactccaagtttagcaggtttggatttgatgaaatgctgagcctttctatagctttctaagctgagaagtagactgtggcccagtgatgaaatgaaagaatttatttttctctcttgtttacaaaaatacttagcttaaatatttacactggttgaatgtgatttanattggacattttcatcaatgcaatttaatgtgtanataaagagcta

SEQ ID NO: 244 - DNA, 419 bp, Bos taurus
  Clone ID: 30-BOVMS1-019-Q1-E1-H5
attgaaatgatcatttgatagacattggacacagttgccagagaatctgcatgaaggagaaaaccctgcagatggctgtggagttggaaggatggtttttaatgtgtaagatacactcagaatgctcacaactgagaatgcctcaactgtttaaagaaaccaccttgagtggcgtctagatttctaatgaagaatgatacagtttggattaagtatcttggactggttttaaacaagtgctttgtcctggatctgttgaaacacctggccagcttggtatcctgtgaaacgtttgttattttctgggtagacattcttatagagtattgtctttaaaatcagatcgtctcttctatattgaaagcatttttatgttttctaatttaaaaattaatattttcttatagatattgtgcaat

SEQ ID NO: 245 - DNA, 67 bp, Bos taurus
  Clone ID: 30-BOVMS1-020-Q1-E1-H5
aaaaaaaaaaaaaaaaaaaaaaaaaaaagaaaaaaaaaaaaaaaaaaaaaaaaaaaaaaaaaaaaaa

SEQ ID NO: 246 - DNA, 136 bp, Bos taurus
  Clone ID: 30-BOVMS1-020-Q1-E1-H9
taaaacccttgcccttggaccatttcgccaggtcagatgtaaaagcccttgcggacgatgaccagcggcgccagcagcccgatgtgctggccgcggtactccttcagcagctgcgaggcgatggattccggcgtct

SEQ ID NO: 247 - DNA, 213 bp, Bos taurus
  Clone ID: 30-BOVMS1-022-Q1-E1-H5
aaaagctggagtccctcaaccatggtaatggaagcatgcatgatcgcgcactcaagcacaaaatcgggcgtcaccctacaggattcaatccgacggacgcgtacatgctacgtgatgacacgtctaaagtgtcaccgaaattcaagtcaccgagcatcatcattaacatcctcgaccagaaaaacctcggtgttactcaacttaaccgccttg

SEQ ID NO: 248 - DNA, 339 bp, Bos taurus
  Clone ID: 31-BOVMS1-004-Q1-E1-H3
cagacattatccaactccgaaaaaaaaaaaagaatcacaagagtccccttaacaattttaaagagagtgacagaccttaaactggcaatggtccttccggacaacctaaaagctttgtcagttgaacagtcttttgcaggagcttcctttcctagttaagatatgtttcagacagagctggctgatatttccctcagactgctccatcttccgccagggagcagtaagagaccatgacgatcagaacgaggacaggctggagtttcactggcttatctccaacaccactgatgcgtctttcagagaggaaaacaggtactagtcttcatagttaagaat

SEQ ID NO: 249 - DNA, 302 bp, Bos taurus
  Clone ID: 31-BOVMS1-005-Q1-E1-H3
gggtcgaccacgcgtccggctgagcaccattgagaagacctgtgcaggatgcctgcataccagagcaggcccagtacttcatgtgagcatacgtgcttcattggcacggcacttccacatcctaacaagtagacgggaacaggatcaggctcatgaagacgtggctcatcaactgagtgaacatggacattagtacgagataccgatacagccgtatccatcacagtatagtgctaaccccgagggagctcgtgtggcccgcgttcatcctctgtatgcgaccaaagaatatacggaacgtc

SEQ ID NO: 250 - DNA, 224 bp, Bos taurus
  Clone ID: 31-BOVMS1-006-Q1-E1-H3
gaggggaaaccaccatatttttattgtattgataccaaagcatttctaataaaagcttgttaaatttacaaataaaggtatggagggtacccctacaggttccaagggggggtacgcttgaatgcaatgtcaaaggcctgccgctctataggataaatgcatatctaggcgtggacgcttaaatcatatctcttctggaaaatcccctagattcacctcattgg

SEQ ID NO: 251 - DNA, 408 bp, Bos taurus
  unsure (78),(364): unsure at all n locations; Clone ID: 31-BOVMS1-007-Q1-E1-H11
aaaaagagacagattacgttttgctttcagaaagaggaatgccgcgacgtcgggaatttgtgatgcaagtcaaggtanggaatgaagttgctactggaacaggacctaataaaaagatagccaaaaaaaatgctgcggaagctatgctgttacaacttggttataaagcatccactagtcttcaagatcagcttgacaagacaggggaaaacaaaggatggagtggtccaaaggctgggtttcctgaaccaacaaataacactccaaaaggaattcttcatttgtctcctgatgtttatcaagagatggaagccagccgccacaaagtgatctctggcacgactctaagctatttgtcacccanagatatgaaccaaacctcgagctctttcttcagtatatctccca

SEQ ID NO: 252 - DNA, 344 bp, Bos taurus
  Clone ID: 31-BOVMS1-008-Q1-E1-H3
gtccgggtaataaggcatatcggtagaactgtatggaaactgtgccatttggtgtggcgcatgtactgaagtgagcttctcatatgtaccatgtcgtgattaacttgctcagtagtacagtcgcatttttatcacactttagtagtcagatttaagattcaggtatcggtttcaacagatcaagtcaagtcagatgattcagcttaacatttaccttcgtagccatttccactaatttctgttgatgatatgccatgaactttggttcaaagcagagtcaatgtcgtttccatcgtgtgacttagtagttccacgactttatgcgacatgttatagtgttctga

SEQ ID NO: 253 - DNA, 82 bp, Bos taurus
  Clone ID: 31-BOVMS1-016-Q1-E1-H3
aaaaaaaaaaagggcgggcgccccaaagggttcaagcttaagttcccgtgcaaggcaagtcaaaacccctccaaaagggccc

SEQ ID NO: 254 - DNA, 421 bp, Bos taurus
  Clone ID: 31-BOVMS1-019-Q1-E1-H3
tgacaggattctttatggctttaatactctgaagctcttagcttggtgagtcctcaaaagagaacgcattgaatgtatttctgcttccaaactcgcttattttggtttggtgatgcagaggacttttgagtactctaattttcatgagatcaaatcaaagaaagcaattactggggaagatacaggaaagataaggaagaagacactgttttagctaatggaacctctcctttgagtttagaaaacgaaccttgtttaaacaatatttatatcataagttaaataaataagactggaggcatttttccgtagtttcaaatttaaaagacacaagtattttaggtcctaaagaaaaactcacagagaaaactaacaaatatttaacaattaagcctatgaagcaactactagtacaataaaa

SEQ ID NO: 255 - DNA, 229 bp, Bos taurus
  Clone ID: 31-BOVMS1-021-Q1-E1-H11
aaaaaaaaaagacgaaaaaaaaagataaaaacataagaaagcaagacataaaagaatcatagctcaaataagaaggaaaaataaaatcaaatcactgctcgacggatcatagaacattcatatctgggggccagtatgttgtcaacctcgttaatggtattgcacgacagcttcccttcttaagctggggggagccccaagagggtttcacctgatcggccttctcacg

SEQ ID NO: 256 - DNA, 281 bp, Bos taurus
  Clone ID: 31-BOVMS1-021-Q1-E1-H3
tcggaggaaaacgcggtcatgggtgtattgcagctcttacgaatgttcaaaacactggcaagcaggttctgatgcttgatcatatgtgacagcactgtgtcgatatattgactgggcgtggagctagcttctcgtctgattacctcgagcgtaccactggagctatatgtgactactgggtatcagcaaacgactctgtgctcacatgcaaaataagatgtcgtcggcatgcacaatcgggtcacacgatggcctaatatagtttgacatgtcagaggtca

SEQ ID NO: 257 - DNA, 446 bp, Bos taurus
  Clone ID: 31-BOVMS1-022-Q1-E1-H3
gaaaataacactggtgcagactttgttcttgtgcagcttggaattatccgatattcctgagaatcatgtgtcctctcaagtgatgactacgtaggaaaactgatactgttgattctgccaccatcttccgtaaaaccagaaaatagtcttcataacgtatggcaattcctcattattgtattgcaacagacactccctgtagatcataaaaacaggctgagaaggctcaaatttaaagggtgatattggagagaattgtaaccaggcatgtggactgttttcattgttgctattggactgaatctcaggagcttgaatgatggagacattgttacacaaagacgctcaggactttgtaatgtcaaagcttcatttcattgctcccagaagtattagtgcatatatttaaaattttcatttatcacagggaaatttaaaattgattc

SEQ ID NO: 258 - DNA, 395 bp, Bos taurus
  unsure (352): Clone ID: 31-BOVMS1-023-Q1-E1-H3
ccgtccgcaaaaattaggattcctccttcctgaaaagcaagggaacaacaaaaaaaatcatgctatcacataataccatggtgaagcagaggaaacagcaagcatcagccatcatgaaggaaatccatggaaatgatgtagatgtcatgcacctgggcaaaaaagtcagcatccccagagacatcatgttggaagaattatcccatctcagtaaccgtggtgccagactgtttaagatgcgacaaagaagatctgacaaatatacatttgaaaatttccagtatgaaactaaagcacaaataaatcacaatattgccatgcagaatgagaaactggatggaatcaacttggnaagtggttcacagcaagcaccatttactcctcctaacaccccg

SEQ ID NO: 259 - DNA, 228 bp, Bos taurus
  Clone ID: 32-BOVMS1-001-Q1-E1-H7
gtcttctgaccaatcagcccagtattgagacgcgtcaggggagcacccccatgggatcagcatctatttcacgcatgacatagcatcttttaactaaaagctcaaaatgtgaatccctgttctgaatttgtttgaaactgtttgaccagtgaagctcataaataaaaggtttctttcaaaaaagagcaatacctgcatatctacaggaaagatgaaaggacaatcaca

SEQ ID NO: 260 - DNA, 453 bp, Bos taurus
  Clone ID: 32-BOVMS1-003-Q1-E1-H7
gaaaataaaaagtatatagatggaaacagtcatatttttagatgatactgtcacatcttttgtttctttatagcaccttaaacgttagaactttatgaatattttgagcaaatttattagagtctcatcacaacagactttaaaggcagcatgtctgggctatatcaatccttcattaggattagaaaatctggtcttgatactataaagaatttatttgcaatgaggtttgtgagtaggtatttgttgaaattaaaatcaccagattaaatgaacgcactgtcaaatctttttaacatagcaacatgctattgggaaaatgaactgttgttttcccatttaaaagtatctgaatattaatatatgatttgcatgtgtaaatctaaagtaaaatacagcaatctaagggtttatgttcctttttcattaaaagacaatgtaatgcattttttt

SEQ ID NO: 261 - DNA, 416 bp, Bos taurus
  unsure (274): Clone ID: 32-BOVMS1-004-Q1-E1-H11
accaagcgtccggtcaatagcaatagttatgatgggggacaagtcaaaagctgctatttttatagctctccaggcagaatttctcctttttttgccttttagttttactatctgataaagagaaggtgttagagggaggagttggtaggaaaggactaattctcaccaacagtagaggtaagttctttaactgcagaacctttacatacttcaggtggattcattttgtgtagcaggaattcttgatgtttctgcccgctctcagtgagtgtcnccactgtgattggatggggcattgccacacctccttccatgtctatgtggaagccccttgcagaggacaccgatggctccgggcacccatatctgtcagctttcattcatttttcgctcatgctgctgttttgctgtactcc

SEQ ID NO: 262 - DNA, 452 bp, Bos taurus
  Clone ID: 32-BOVMS1-007-Q1-E1-H7
gaaatctacatttctgaaggaacccactcaacagaggaagatatcaacaagcagataaatgacaaagagcgagtggcggctgccatggagaaccccaacttacgggaaattgtggaacagtgtgtcctggaacctgactgacagctgttttagagccactgatgtataatcatttgatatatttgtttaaagtctttgtaaaatgtaaaagattaatacataggtgatttgtacctcaaagcatttttttaaacgatgatttccaagcaagatttaattatcaggtagtacctagtttgttcaatgtctaacattctcaggatttgtaacccttaaatgatcagacaaaaatattttctagttattgtgtgtaagatgagttgctatttttctgatgcccattctgatgcttttcatgtcaaaatatttactgtgcccaaatgtattcaatt

SEQ ID NO: 263 - DNA, 351 bp, Bos taurus
  Clone ID: 32-BOVMS1-012-Q1-E1-H7
gaaaaatgaaaaagctaatgaatctgatggtgcagaagttttacaggttactaacactgatgatgaggtggtaccagaaaatcgtaaagagaatttgaacaagaataataataacaattatgtagcagcgtcatatctgaataattgcaggcagaagacatctgttttagaatttcctaatctattgccactgtcaagtgaagtgtactacactgcaaatgaatatcaaattgaaaacttagaaaatgcttctaaactctcggagttacttggtatatttgaatctgaaaagactgactcaagaaacgtgctgcctatgactctagataaacagactgacggagctactgc

SEQ ID NO: 264 - DNA, 460 bp, Bos taurus
  Clone ID: 32-BOVMS1-014-Q1-E1-H11
gggaggtatgagattggaagagagaaagggatgaagaagaaaaaacatcgatcgcagtcgtaccttgaagagtaggccaatggatagacgcaagattctctactactcatccaataaatcgttcgtcagtgttgcacatggatgtccgctacagcacacagagtacttgtaggtggcaatcgtatgcgatatgcattgtaaactgcatagtatttgtatgatgtaaacagtgagagtcataacataatgctagatgggaaaaaaatcaggaataaagcatatcgctatgtgggataccacgtacttttaaaggcatacgatgttataaccacacgatatccagccatattcaacattaactgaaaatcttcgaaatttaaatgtacatttaattcacagccatatatgcactacagcaatctacgagggtctccttcctctttattttgagcaactgaac

SEQ ID NO: 265 - DNA, 400 bp, Bos taurus
  Clone ID: 32-BOVMS1-017-Q1-E1-H11
agaaagcagaagcaagagaaaaaagaaacaccgtagacgatcttcttccagtagttcttcagatagtagaacgtacagccgaaagaaaggtggaaggagatcaaggtcaaagtcaagatcttggtccagagatcttcagcctcgctcacattcttatgatagaagacgcagacatcgatcaagcagtagctcttcttatggctctagaagaaaacgaagtcaaagtcgttcaaggggtcgaggaaaatcatacagagttcagaggtctaggtcaaaaagtagaacaagaaggtcccgatcaagacctcggccacgttcccatagtcgaagcagtgaaaggtcaagtcacagaagaacacgtagtcggtctcgggatagagaacgacgtaaaggcagagat

SEQ ID NO: 266 - DNA, 169 bp, Bos taurus
  Clone ID: 32-BOVMS1-020-Q1-E1-H7
gttattttttgttgttaatgttttataagtaattttccctacttgatttttcttttataaaatctcatagaacagtgtttatgatacagccatttaatatatgtacaaattgtaaagaatatgtataaatgttttacacaaatgcaagagcatgtagaagccaacatat

SEQ ID NO: 267 - DNA, 439 bp, Bos taurus
  unsure (428): Clone ID: 32-BOVMS1-022-Q1-E1-H7
gagatgacacattcgcattttattttagtgactaaaggcatgaaacacaactactaatattaacaggatatgatacagaaaattagaagagtataagcataattacacaattctaattccaaagtttaaaaaggaagatattaggattatagagtgttagttgactttgttctttttttctccctttgaaacaacaaaaacttaaagagttaagattttatattttcatcagctttatgcttaaatttatataaacagatcaatgctataattctagaacaaaaaattcaagagctgaatttttaaatagtataattaaaaagggaacagttgaattattaagtaccttgctcaaacacacacatcacctgtctaagaaattttgagacaatcaatcattaaggtttgcagaataccaaatgcatttntctaaatgtca

SEQ ID NO: 268 - DNA, 455 bp, Bos taurus
  Clone ID: 32-BOVMS1-023-Q1-E1-H11
ttccggggccacccacgcgtccgtagaattcaggtactgtgtgtacaattttatcaacatctcgacccatgaaacttacatgttgtgccaagaagctgttggttctcataaggtacccatgtccagcatttgcagattcaggtatcaagaagcagagctgtctcgtaagtagcactttactaccaactcagcatctgtacacagtgtctacatcaaatgacattggtccactaacagagtatcacatattaccctcacaaccgtctgatgtaaactcgtgcaattttccatcaagtatattttgcttaacattttaaagtacctgatgagggtgttaattttttttccctaacctgcttagacaaaaattgcaaaaaaaaaaaattgacaagcaaggtgattgaaggatgtgatgactgctatagctctctgcgttcagttgatatgaaataaac

SEQ ID NO: 269 - DNA, 327 bp, Bos taurus
  Clone ID: 32-BOVMS1-023-Q1-E1-H7
ccacgcgaccgtaaaaagtgattttctacattaaaaaaaagactgaaagaaattgtatagttcttaactgatggcatttcagaactctgggattattttaatcttgaagtagtggatggtatagtaataaaaccattcatccccttcttgattgtatcttttaaatttctggctttaccttgatatctgagaagaagtaagtgtttttgtgttgaaatcataaactgtatcacctgctacttctccaggttactttttaaatttgtcgtgtgatatggcttggctttcattctgtttggtgttgagatctccatgtccatatggtgc

SEQ ID NO: 270 - DNA, 283 bp, Bos taurus
  Clone ID: 33-BOVMS1-005-Q1-E1-A2
ctgaacattaagagaccagtctgcttaaacattgctcttatgtcaccatgagtgggagtggttcagatgctgtcaatgatgtgtagcagacggctgctaattctaagtctactggctatctgagtcgatttgcctattatgtgtacctaattatatccaaatcacagtaggatccctaaatttcggaggacgacactaatgattaaagcttgtgtatacgtccaggtgacgtgtcatcacatctatagtgtcgtctatattcaattcactggccgtcgtatta

SEQ ID NO: 271 - DNA, 80 bp, Bos taurus
  Clone ID: 33-BOVMS1-012-Q1-E1-A2
ctttggtcatttctctctgtaattatcatctatcctactctactgcaaaggaaataaagagcatagggcactgtataagc

SEQ ID NO: 272 - DNA, 419 bp, Bos taurus
  Clone ID: 33-BOVMS1-014-Q1-E1-A2
gccctccgttctgtgaccttgtccaatagaaggccgtttttgcagctgcacaagttttgccatacaagatgaagcaagatgccacaagaaatgctgcctacactgtggattgtgaagattatgtgcacgtggtagaattcaatccgtttgagagtggggattcaggaaacctaattgcatatggtggcaataattttgtgttcgttggcacctgtacatttcaagaggaagaagcagatgttgaaggaattcagtataaaacactacgaacatttcaccatggagtcagagttgatggcatagcttggagcccagagactagacttgattcattgcctccagtaatcaaattttgtacttctgctgctgatatgaaaattagattatttacttcagatcttcaagataaaaatgaatac

SEQ ID NO: 273 - DNA, 450 bp, Bos taurus
  Clone ID: 33-BOVMS1-016-Q1-E1-A10
ggtcgaccacgcgtccgcttatcaattactgaattaattggtatcgtagaactcccaggactactgggagataaacagatgtcatcaaacctggcagatttcccttcaggaataacaaagagcatgatattccacagctttcctaggatgttcgctgacggattctctttagtactaagcaaaatcctctttgcaggatgtggtcgaggccaatttataattaaatccccgtttgttctgacgatacttcagaagtagcattaatatgttaaagaagtttggtcttccttgacttgaggagcagctcattgcttagctggagttttaattctgtgatgtgtacatggcttcatcagcctctgtgcagcgttttgggttgtgtggtatttgacagaatcgcaataggattcccccattttggtttcagaaagacaggagtagtatgtttgt

SEQ ID NO: 274 - DNA, 378 bp, Bos taurus
  unsure (280),(324),(330): unsure at all n locations; Clone ID: 33-BOVMS1-016-Q1-E1-A2
tgactgcccacggccagaacccacaggatcctgctgaggaggggagcccagtgcgccaaggccatcctaagggtctggtgagacagccagcaacaagaacagtcatctttttttcagtgggaatatatatatacacatatattctaggttgggtggtaatggatccttcagggtcaatagtttcgaagccaaagatgtgctgagaagtcttaggatgcagttgttttgttgttgttgtttccctgctaccagtgaaaggcatcctgccagggctctctangaggagcttcccagaatgcaactctgagtgatcaaatcctgtanctgtanggtgtgcgtgctttctcgtgagtgtggaggctcctccaagagcagcct

SEQ ID NO: 275 - DNA, 264 bp, Bos taurus
  Clone ID: 33-BOVMS1-019-Q1-E1-A10
cttccaagtgtgggtttatttcaaaattatgaagatttatatattattttttattacatacaataaagtggtttagcttaaagtaaaagctttcacatttaaagtttttattttaaaaagatattttaaaaatgtagacccttaaaaaccaccaaaaaagctgaatatatcttgcagcgtaggtttatccttaaatactcacatctcaaatgctgtttagaaaagagatttcacaactggctaaaaatcatttacacttggcaa

SEQ ID NO: 276 - DNA, 68 bp, Bos taurus
  Clone ID: 33-BOVMS1-021-Q1-E1-A10
cccacgcgtccgcccacgcgtccggtttgaatgttgtgtgttgtgttttttttgtttattttgttctg

SEQ ID NO: 277 - DNA, 206 bp, Bos taurus
  Clone ID: 34-BOVMS1-001-Q1-E1-A6
aaggatctattagagagaacacagatgtgtccgaagtaatacgccttgacacagatcttgctttcactaccaggtggactatgaaattaagacgcatcgatcacaagtcagaaatccttctcagctggaatttggacagcgaattgccatgtagggagcacttaagctcagagggtgtgctgacaaagcacatcggttccgcttca

SEQ ID NO: 278 - DNA, 460 bp, Bos taurus
  Clone ID: 34-BOVMS1-006-Q1-E1-A6
gaaaaagcatttgtttttctcaaggttacctagatgagcaataacatagatgtgaatagcaattgtatttttaaaaaataataataaatttaattaaaacattttttgagttattcttcccaaaagacattttttctgaaataaagtctgctaacttagcatggtgtagattttttatgttccatgctactcattttgtttaactagaaatgtgaaaatttcaggttttcaactgatgtgcaacaggtgtaaacttttcaaatttaccctttgtcagttttaagcatcctgtgctgacatattgatatcataaattcatagaaatgtttttcagcagataagaggcaggaaacctccaatttttaggtagcacccctagagctgtgcacagtaaatgctctacacctgtgtcttactcagacacagtggaaatgcactggtttagaacataaatgatatt

SEQ ID NO: 279 - DNA, 449 bp, Bos taurus
  Clone ID: 34-BOVMS1-007-Q1-E1-A6
cagaaccttgcttgtagcaagccacttggcaagtcgtctgctaatcgtctggtcactgaaatgaagagagttcacctgtcctgcccaccccagaggactgctgtgaagattaatgaaatattacacattctggggggagcaagaaccatttccagagaaaagaaaccccaccggttcctcaaaaacagaatcgaaatacttacatcttctgaaaaagccctgagcttcaagcagtaaggacctaagtgggacagacactaaagttggtttttcttttcacagaatcaggaatgaaaaataaaggtttgggtgacatctttttcatcagagactaaacccagatcttgggtttgagttgggtcttaaaacatttcctggaaaattcttctctgattatcttctgctcagatctctggtggactagaacagcatgtttgagcatcatgaac

SEQ ID NO: 280 - DNA, 455 bp, Bos taurus
  Clone ID: 34-BOVMS1-009-Q1-E1-A6
cagaaacaggcactccggtggagaatcgcgcctcttgggcttctctccgcgcccctgcgttcgcgtccgccgcgcggagaggaccggacgaagcacgtggctttctacaagatgaccatagaggaccttccatattttccattagaaggaagttctttgattggaaaatacccatttttatttcaaggttctgatacaccagttatcttttccatttctgcagcaccaatgccttcagactgtgagttttctttctttgatcctaatgatacatcatgccaggaaattcactttgatcccaaaacttctgtatcagaattatttgccattttaagacagtgggttcctcaggtccagcaaaacattgacgttatcggaaatgagattcttaagagaggttgcaatgtgaatgacagacatggattgacagatatgactcttttgcattacacatg

SEQ ID NO: 281 - DNA, 154 bp, Bos taurus
  Clone ID: 34-BOVMS1-010-Q1-E1-A6
gcaaaggggaagagggacaagggtcactctacggggtaggggtggaaaccaaaacagcccaaggatataattaggacttctttattaagtatttggtcctaaatatatcccacaaagggacgtaactagaaataaagttttatgtttagaaggt

SEQ ID NO: 282 - DNA, 320 bp, Bos taurus
  Clone ID: 34-BOVMS1-013-Q1-E1-A6
tgaggaaaaatgtttttaatgaagaaaaaatatcaatattgcataaacgataacataactaactgccacagcaacaatagaatatgcaaaaaaagaatccaggacccttacaggagtggtgccagtattgttacttcgtaacttagtgcttatagcgccgtaagcagcctcctcaattgtacgttacagacatgcccagttctgtaccatgtaaagttgagatggcggcagtaccgtgatgacacccctttatgtcgactgtcatatcctttgtgttgcaacactgggaatatttacaaaggggactgccaatatttttt

SEQ ID NO: 283 - DNA, 357 bp, Bos taurus
  unsure (344): Clone ID: 34-BOVMS1-014-Q1-E1-A10
ccaagtcagacagtatctgatcgatcagtggcaccgggtggcacagtgagtgtcagatctcgaaggcctgatggacagtgcacagtaacggaagtttaaataaaagttttcagatccatgctcaagatgaaaatggttatctgtaaatttttgcccacgtaacattatactcatcgccagtagtgcattttgggacttggggtgggaaggggtatgggaaggatagacttgtacttaatatgtctaacacatctctgttgagaaatttatttaatataaagaacttgggtgttaatagttgagagctgtttactaataacgcagttttcttgaggtctgtttantttataggttttt

SEQ ID NO: 284 - DNA, 121 bp, Bos taurus
  Clone ID: 34-BOVMS1-017-Q1-E1-A6
atgtgatgcgtggagccaggagcttgagggggagaacagccagtgtgacataggccatggcattatcttaaatagtgaagatgaagaaatattcagtaatgaagagcacgaatttgcatcc

SEQ ID NO: 285 - DNA, 446 bp, Bos taurus
  unsure (438): Clone ID: 34-BOVMS1-022-Q1-E1-A6
gcagacagctcttgagaagatagaggccaaagctgatccgagcatcctgcagaacttgagagcccttgtagccatgaatgaaaatctgaaaagtcaggaacaggagtttaaagcacattgtcgagaggagatggcacggctgcagcaggaaatcgaaagcctgaaggctgagagggcgccaggcagagatgaaaagaccctctctgggggagagtcacatggtgccttaacctctgcgatgacgcacaatgaagacctagacagacggtataacatggagaaagagaaactttacaagatccgtctactacaggctcgaagaaatcgagaaatagcaattttgcatcgcaagattgatgaagtgcccagccgagccgagctaatacagtatcagaagagatttattgaactctaccgccagatttcggcagtgcacanagaaacaa

SEQ ID NO: 286 - DNA, 121 bp, Bos taurus
  Clone ID: 34-BOVMS1-023-Q1-E1-A6
cacgcgaccggaagcctgatgttgtctgtgtacgctaactccaccgtttccagcctactgccaataaacagctatttaacggggaaaaaaaaataaaaaaaaaaatcaaaacaaccacaag

SEQ ID NO: 287 - DNA, 376 bp, Bos taurus
  Clone ID: 35-BOVMS1-002-Q1-E1-A4
aggtgaagtggtggacaggcaccaaagctattttctcatccacccagtggatgagtgggactgtgaaacaggtgatgtggaatgaatgggtgcaacagctgtacagacaatcaataacacacacagttctggaaagaacacatcacttgtgcttgtttgatgagcttgtcacattctaatccctctccccatcctgtttcaattttgggaaacttgtatctgctggtgtcagcaattctgattctgaaataggatcaggcttttactacatacaaccgccttctctttctatttattgtgtcgactcgtggcttatgattaaaggcacgcaaagtttgcagactctaaacccttaagagctgtcttaaggacattt

SEQ ID NO: 288 - DNA, 354 bp, Bos taurus
  Clone ID: 35-BOVMS1-007-Q1-E1-A12
aacaactgtgttcctacagtgaaaaggttcgattgtagtgaaaatataacatgtattgactgatgtttcctttctaagtagtgctttatctctattactagtattaagggataagaaatttattgaggacagggatcagctctggtctgtcaacctcagccacctgtttgatgtcacagagaacttggggattgttggaatgtacatagtttagtaaggtggataagaaagaggggattaataattacagagtacttgttatctaccaggctccttgccagatgttatatatatattagcttatttcaaagacttctttaaagtgaactggatgggcaagaaggataattattc

SEQ ID NO: 289 - DNA, 386 bp, Bos taurus
  unsure (356): Clone ID: 35-BOVMS1-011-Q1-E1-A12
gaaacatctcatattaaaataaggattattttcttggatagtttgcactgggtgtatatgtgtcaggcactataaagtgtctgttggtggcttattaaaaaatgcaccttattttttctaccataacctttctacactagaaaatgagatactttagaatgcttctaatagtagcattcttactatgatatatgagaatttcactttataatgaggtgagttaatttgcagctttttcatgtcattgtggaaattgtttgattctgaaaacattgtattatagtatgtcgtttcatatgtatcgcttgcctattattaagagtaatattgcaccaattaagatgtgttcagattangatgtaaaaaaatcataggtaccctgtttt

SEQ ID NO: 290 - DNA, 463 bp, Bos taurus
  Clone ID: 35-BOVMS1-013-Q1-E1-A12
gtccgggaatcacgggtccgaccaacccttcggaaattctcaccagggaaaagtaatattcttaatttttctttctattatcttagctcagaagttcccctaaaacggatgttgtctgccatgggatttagttctggattgtaatcatccgaaatataccactttgaaaacaagttttacccataaggtaaaaaatacagttccttacagggtttatccctgaattgtaatcttctgccactttaaaaacattcaagcactagttttcccagagctttgcacattgctttcggtgattctggtatgtgcataaattttaaaacattgacctttatgagaattacgggacgatcaacgttttaccatgtggaaaaacaacataacaaggtaaaatagtgattttcatatgctagctttcaaagggagataaactactgtgtgaataaataaactgttcaaaaac

SEQ ID NO: 291 - DNA, 451 bp, Bos taurus
  Clone ID: 35-BOVMS1-013-Q1-E1-A4
gaaaaatgtttttatttaaaataattatgaatattgcattattgtatcataactaactgcctcagcaacaatgaatatgcaataagagaatcctgaaccttagattagtattgacagtagtgttactttgaaagaagtgtatatagtgcaaaacgctgattcttcatttgtacgtttcacacatgctcagttctgtaccacgtaaattgagatggcatttgtacggtgatgacaaacctttatgtcgactgtaatatcctttgtgatgcatctctggtaagatttataaagggcattgccaatactttttgactgtaaattaagttaatttttgtataatgtacagtttgtttaaccttagagcttctatagatttctactttttattatacttgaatgaggcagaaaagcactgtggaaaatctgtagctctggatgtgacttgcaaaca

SEQ ID NO: 292 - DNA, 256 bp, Bos taurus
  Clone ID: 35-BOVMS1-014-Q1-E1-A4
tcgaccgacgcatccgtccatgcatactgtgtactgtgcatatagaaagcccggttaatggcagttctgaatgcactcagcatacagacgctgagagacgtacacatcgctggacggactgaggactcataggcaccaatataactgggtctgatcatgtctttgttagcatatgatctgggatacaccactagatgtcggtgtgactcattggtatacatgttgtgtagaacaatactgcaatgagattgcatta

SEQ ID NO: 293 - DNA, 406 bp, Bos taurus
  Clone ID: 35-BOVMS1-015-Q1-E1-A12
catgacattgcagtgcagtttcacagatctttatttttagcaacgcagtgtctgaggaaaaatgacctgtcttgactgccctgtgttcatcatcttaagtattgtaagctgctatgtatggatttaaatcgtaatcatatttgtttttcctgtatgaggcactggtgaataaacaaagatctgagaaagctgtatattacactttgtcgcaggtagtcttgctgtatttggggaattgcaaagaaagtggagctgacagaaataacccttttcacaatttgtgcactgtgtacggtctgtgtaagttgatgcagattttctgaaatgaaatgtttagacgagatcatgccaccaaggcaagagtgaaaaagcttgcctttcctggtatgttctaagtgtattgtga

SEQ ID NO: 294 - DNA, 71 bp, Bos taurus
  Clone ID: 35-BOVMS1-016-Q1-E1-A12
ataaaaaaccaactggaacatgaaccaaatcaagtcagaaaattgaaaagaaaattgctgaaaaagataaa

SEQ ID NO: 295 - DNA, 412 bp, Bos taurus
  unsure (99): Clone ID: 35-BOVMS1-021-Q1-E1-A4
ttctagatcgcgagcggccgccctttttttttttttttttttttttttattaacaatttattttatgtggcaaatgaaagaataaccttaaaggatttnttttttcagatttaatatatttgcctgctttaccaactaaggtgatggagtgatagaaacagaggtagaaaatggagtttgcctccatctcacagattacaaaatagttaaagctcacaaaggcaagtagggagcaggaacaaactgagagagacattgacggaagcaagactctaacaccaacttagaagatgcaacagggccaccagtgaaacgaacgagcagcgtcctgggactccactctgcctcaaggtcagcagacagaactggacatgagtccagaggagccaagggctgcagctacaaacacacg

SEQ ID NO: 296 - DNA, 100 bp, Bos taurus
  Clone ID: 36-BOVMS1-001-Q1-E1-A8
acccacgcatccaaaaaaataattaaaaataaaataaaatataaaatactaaaatttgaaattaatatataaaataataaaataaaaaaataaaattata

SEQ ID NO: 297 - DNA, 207 bp, Bos taurus
  Clone ID: 36-BOVMS1-005-Q1-E1-A8
agctaaatatagcaaggggggggtcattatgttctctcgggcgggcgtctctggactcactgagtggaccgtgcatccgcaatgagcttgctgtcgatagtaggcagctttgtgggatattaccatccgccgacaatgactcaagtacattaagaagattatcaggtctgatgaattcggcgcagcagagacgctacaccagacatg

SEQ ID NO: 298 - DNA, 470 bp, Bos taurus
  unsure (423): Clone ID: 36-BOVMS1-006-Q1-E1-A8
gtattatttctaagttcaagcctttagtttaaaaaaaatgtatatagcaatttaaaatataggacacagtaacttttcagctccccttggaaagtagaaatatttaggaaacctttgaaagacactaaatagtactcttaagatcaaaccaatattatgaaacaatattccacagagtaatatatatgctgcagtgtaagaaaaaaagaactcatatctctaatattatgacagtagtaaggcttagtctcttaggagttggggcagcgtgttgtataatgacaaatttgcaaactgtagaaatagtccaagtttttgtgactgtacaaagtgtcaaattaatttctatttcactgcccgctacagcctgccgtgacgccagtgccgcatatttgccagtggaggagataagcctcaaggtanagaataacgtcctgtgtttacacgtttgcacagactacacactgtta

SEQ ID NO: 299 - DNA, 61 bp, Bos taurus
  Clone ID: 36-BOVMS1-009-Q1-E1-A8
aaaaaaaaaaaaaaaaaaaaaaaaaaaaaaaaaaaaaaaaaaaaaaaaaaaaaaaaaaaaa

SEQ ID NO: 300 - DNA, 314 bp, Bos taurus
  Clone ID: 36-BOVMS1-014-Q1-E1-A12
tcacagcaaggaatttcagcacgctcaactgacctgtctagtatcttacatcataagttcccataagtcgggtgttgtctgccatcggattgacttctggattagtcactcccattgagacacacgttgaaattgtatgttaggcacataggaaccatttacaccatccgtatcaggtttatcccagaccttgtcagcgtctctccacttgtaggcacattgctgtcgctaaattttcttaccggctattgcctatcgacattcgtgtgagtcgacatttatgcaatcacttttaagctgactcacctcttacc

SEQ ID NO: 301 - DNA, 439 bp, Bos taurus
  Clone ID: 36-BOVMS1-014-Q1-E1-A8
tgaaaccagtgttcggtgccaaatgtaagcctggttaattggcgttctaaagactggcaaataagacactctgtgatatgtacacattgtttaactggttaaagagtagaatgcatcaagccaacaaggtcttgagctgtctttgtagcttattatgctggactgcaccacacgatgtctgcattactcattgctaataatgtagtgtagaacaaaactgcactaagattaatttatttacaacaagtaattaaaactctacgtttggttttcacatacaacaactctttggagtaacatgcatctgaattttaagttgcaaatgtatctgcatagttaagttttcatgtgcatattttgtatgatgttttggttcaagaaagaatgtttaaagcttttttaaagacttcagttcttaatgtaactgtacccttctgca

SEQ ID NO: 302 - DNA, 433 bp, Bos taurus
  Clone ID: 36-BOVMS1-017-Q1-E1-A8
tgagataaaagattgatgggtcagaatttctaccatgtttctaaatttaatgagatagctaacctccgttttgaaagaatccagttactcagttaaagcaacaatgtgcaattgatattttttttaaagtgagagagaaaattagagctatgatcaaccacaaagaagtattcatcagccctacaaaaatttcaagttgccaactgacaaagaaaggctaatactgcactttgattttaaaaactagctttttcctttgaaatattagtaatggatttaccttactgagatttatggaagccatcagaagtatgttagaagacattgaatcatcatgaagtgaactctactttcagccaaactacaaatgtttacagttttctcttctgatttcaactctacaagacatgtttttaaggacaaatagctaaaa

SEQ ID NO: 303 - DNA, 65 bp, Bos taurus
  Clone ID: 36-BOVMS1-020-Q1-E1-A8
cccacgcgtccgggtagttctaaatttaaaccagaaactggggcaactaagcaatgagccacagc

SEQ ID NO: 304 - DNA, 353 bp, Bos taurus
  unsure (347): Clone ID: 37-BOVMS1-003-Q1-E1-B10
ggtcggaatcatgggtcggcccacccttcggggcaatgaccttccaaaaccaacaatcctggccgcctaacaatggcaattggggaataatcccaaggtgggtggcctggatggtaaggaaaaacctttcgttcgtggccaattaaccagtggcaatggaattgcccgaatcgggttgtctaaaaagagcattcccctaaaacctcgattcaggttaacccgtttgactatgatactagcagattggacaccttgctaagtcacaagcacagcgtgaccttacaataaagcccagggaagacacacaatccatttagcccctgtgcttagaatattagttaggatcnctcctc

SEQ ID NO: 305 - DNA, 501 bp, Bos taurus
  unsure (260): Clone ID: 37-BOVMS1-006-Q1-E1-B2
ggtcggcattcagggtcggccacgcgtccggtcctatacatggttgacgatgatgatgaggaagcagatgatacccgttacacccagggaacaggtggtgatgaggttgatgattcagtgagtgtaaatgacatagatttaagcctgtacatcccaagagatgtagatgagacaggtattactgtagccagtcttgaaagattcagcacatatacttcagaaaaggatgaaaacaaattaagtgaagcttccggaggtanggctgaaaatggtgagagaagtgatttggaagaggacaacgaatgggaaggacaagaaaatggagccatcgatgctgttcccgttgatgaaaatctgtttactggggaagatttggatgaactataagaagaattaaacacacttgatttagaagaatgacaacaaacaagtcaatgaaaaaattgagccaactcagcaagagttgaaattgactacattaatttttttccaaccaaaact

SEQ ID NO: 306 - DNA, 384 bp, Bos taurus
  unsure (205),(347)...(348): unsure at all n locations; Clone ID: 37-BOVMS1-009-Q1-E1-B2
tataacacttttttagtaagaatctttccacttagagccctaaaattaaagtgctactttaaatcttccgcattgactttttctttcatgctgtcagctttgaataacaatcacagttatggcagagaacaggcgaagagatcaagcattaacaagaatggtagataagtcaagtctgtactggcttaacaactgagccatgcanaggaggagaaaatactcagttaaaaattttcatcaaaatctttaagagtatactgaagaaaagacagtcatagcacttccagcaacttctaaaggctacatgtttaatacttcatgtaaaaattactccaaatttgcactannatacaatgaagtgttatttttctttagttgtgttgc

SEQ ID NO: 307 - DNA, 137 bp, Bos taurus
  unsure (11): Clone ID: 37-BOVMS1-012-Q1-E1-B2
gtggaacctgngattcagaagagtgagatgaccatgtggtggggcacggctccctggggaaaccttcctggactgttgcaggagattggagtggggggactttgttcttcccaagaataaacttcaactgctgtctc

SEQ ID NO: 308 - DNA, 379 bp, Bos taurus
  Clone ID: 37-BOVMS1-013-Q1-E1-B10
gggatgcctctacgacattatgactctggagaaggactttcaaatggagaaagataagcactcaacatgtacaaagtactacagctatttattacatatttattataaaaccaaaccgccaagagttaaagcaactatttaatgtcatttgcggatcgctgtttatttgcataaagtgacctcagtgtctttttactgtactgttactgtatatctggtactgtacactaagatttaatgtggtagggccataaattagtcttgtttcccatatttttcacttttgtaagaaattcacatacacttctgggttgctcagatgttcagatttttttaagggattctaaagcatttcattactttgtactagatatgtgtt

SEQ ID NO: 309 - DNA, 280 bp, Bos taurus
  Clone ID: 37-BOVMS1-013-Q1-E1-B2
cggtgcgacgcacgcgtcctcaggagaatcatcatgagtacgattacgtgttactaatgggtgactatggggtgaccgtggtctgattctggaagagtatgtcctgaagttctttccactgcaggggcatgtggacacaggtatgcagatgttcactgctttgttgtacagaacaaagccataacggaaacttacgtcgtagacatcactccagaggtaatccaggtcacgtcatacggaaattattggcagaatagagttgtatatagacacaacatgt

SEQ ID NO: 310 - DNA, 335 bp, Bos taurus
  Clone ID: 37-BOVMS1-014-Q1-E1-B2
ctaagggttacgtatgccagcatgatatgtcacagttcatcaaaattgaacagggagtgcaatttacaggtcgtagtcttacatggtcttgattgagaaaaatatggcgtgataaatgtaactcaacttgaatcaaatgcccctttctttaaaaggcctaatagggaaaaagccggcactgatcaaccttaccagcatttgagcaacccccctttcgaaaggcaggcgcaatgtcgcgggggcttaaacgattcgcctttccaagttatgcccaacctgaacgggacacttgtcagcgccctaacgcgggcaattaacgccgtcggctctgcagt

SEQ ID NO: 311 - DNA, 414 bp, Bos taurus
  Clone ID: 37-BOVMS1-019-Q1-E1-B10
atcatgctgtgttgaaatccttgtctcctgtagacccagtggaacccataagtaattcagagccatcagtggattcagatatggggaaagttggtaaaaatgatactgaagaggaaaataataaaacctctacagctgacaatgaaataagtagtaggactgagtatttatgtgaataccctgtacatggtaaaagtaaagacaattctgcaaatgaagtcttccaaggagctgaagaaagagcacattaccaatgtgagagtgaagatgagtctccgcaggcagatgtagatggcctggcccctgcccacccaacccccatggtctcatcacagccctccatcaagcagaggctggcacagctacagctgtcccctggtttcactttcactgctggcctcgctgcagaagtgg

SEQ ID NO: 312 - DNA, 268 bp, Bos taurus
  Clone ID: 37-BOVMS1-020-Q1-E1-B2
gaaaatgcctatactttcccactttcttctgttaatatttctggtaatgtcaaactgaagggcagctcacactaaaggatttcacctgacatacacgtgcatgcaacatcataacccttcaagtatgtcaccgggcggtcactccacaggatgtcagtttacatagtcgtgaatgggaaatccctggtcttcaacaatgtaaccaccttcaattaaatcggccttcctttacatggccttaaacggaaaaagccctgaccgatccacc

SEQ ID NO: 313 - DNA, 88 bp, Bos taurus
  Clone ID: 38-BOVMS1-001-Q1-E1-B6
aaaacaggaaacataggactataaaaaactgaagcacatcatcagccaaagaaaaatagaaaagaataaaagaaatggcatgggttgt

SEQ ID NO: 314 - DNA, 422 bp, Bos taurus
  Clone ID: 38-BOVMS1-004-Q1-E1-B10
taaaaatggaacctgggatgcaggaacaaaagaaggaaatgttgggcaaacatttttgtgggagctcccttcgctgttgtgcagcagaaacagattctcagttcatttttactcccactgtattatagtttaacaaaaattgtttatatcttggaaaaaaaaaactttctgtttaaaaataaacaagtgaatgttggaaattagtctgttaatgttcttaataaagtgttcttggagtttaacctagcagcggatggctttctttagcttagcccagtttccagggaagcattgttttttccaggctgtaaaatggcagaatctcctggatatataatttattctgttggaaaaaaaaaaaagcatgcagtatctatgacctatctgcagaaggagtttttgtaaatgtagattttgatgta

SEQ ID NO: 315 - DNA, 409 bp, Bos taurus
  Clone ID: 38-BOVMS1-005-Q1-E1-B6
tttacatcctaaaacgcagttttgcaattgtttagaaaatgtatagccaagtatgttacatgtaatttgaaataaggcatcctgagtaaatttggcagcaagttctcttactcttatcagtggtattaaaaagaaatcaaagtaaatatttaaatactttaatattcagcttgttttgttaattctctgaataccatcagcactcattgttaggtttgtcatgtcatacggtggcagcattttgaattatttttcaaagaatgctgttcatatgtgttgtttttgtgtttgaaactaaatactggcagttttgttccagctgcgatattgtgcacaccatatggatcattttaaagaaacttttaaaatttcaaatagattcaacaattatattacttgctttaccttt

SEQ ID NO: 316 - DNA, 428 bp, Bos taurus
  Clone ID: 38-BOVMS1-006-Q1-E1-B10
tagagataccagaggtaaaattactctgtcaaatctatgtgaaaggttataaaggcttactctcagtttttgtacttttgctgctccagactggtaatggccaggttgaggacctatgtggttcctggtacacaagtgctctgaaaagtgaagggtgacgtcatctctggctcaatgggcgctcgttactcagctacacattgaatccagtgaccccaacctcccacacccagcagtactgtccataaacggtgcttgggaaattagttgaattgaatgaacgaataaatgaatgcacaacatatattagtttaatgaatgaatggattgttcaaaacaattttaaaactcaaaatcctcaagaagaatttgcctaatgacatgccaaagggaataatatttttttaaccttgccttttggtaaattc

SEQ ID NO: 317 - DNA, 460 bp, Bos taurus
  unsure (214),(325): unsure at all n locations; Clone ID: 38-BOVMS1-006-Q1-E1-B6
acggtctaccaaccgggtcggccacgcgtccgtcaagactatcctagaagtcttttctgacctcacaggaagagtcccagctttcccagcaacccaaggacccctaaagaaacaggtctcccaggagatgtctgtccctcatgtggtccatcctttggaggctcacacagcacttcttgactggctccctgccttacgtggtggcctgccctgnggtctgctggacacaagccacagtgttggggtagacaaggaagataaacgaggggcttctccctctccacagagactctggattttcattgttcctccagttttattgtanggcttaacattcccctcaaaaagctcatcttctaatgcttggtctttgtttcaagaaaagccagttttcttctaccacattttccagcatcaactttaagaaaaatgcaacctccattgcaaaaagaaagtgggg

SEQ ID NO: 318 - DNA, 437 bp, Bos taurus
  unsure (381): Clone ID: 38-BOVMS1-016-Q1-E1-B6
tgaactgaacctgaatatccaatgtgcctaaaggcagatttttaacaagtttgcttttcagaatgctgccacttgacccttttatctgttgtatttagagtggcgtgctcactgccatcttaggtttgggcgtaggtctggcatgttacatgggaagtgaaatatcctgggcaagagcagtcaaacatataagaaacatgagaaattaataaaagtaggcttttggaaatagggtgaagcatgagattaaatgatctcagttaatacaaactgttactatatgttcagcagtgcatgggatacttacatggagcttagtcctggttgagacaagtttcagggtgacttcccgggacgttccagtcgttagttccactgcanggttcatggattccatccctggtcagagaagtaagacctcacactggatgttgtat

SEQ ID NO: 319 - DNA, 119 bp, Bos taurus
  Clone ID: 38-BOVMS1-017-Q1-E1-B10
cccacgcgtcaagcaatttaatacaaatatacataccacggttttacattacactgacattgattaaatgacttgcatatccttcataacttttctatgaactcttcacatacaatcac

SEQ ID NO: 320 - DNA, 418 bp, Bos taurus
  Clone ID: 38-BOVMS1-017-Q1-E1-B6
acaaatttcacatgctctgaaaaccttcaaaggtgatagttttttcacctgaaaaccctaggtccaatctgttaattttctgagaatgtcagaatgaaaataatggggttatcccatacttgagagtattgttcttttcaggatgttgtagttattttagtaagtgaccaaccaaattgtgatttgacttataataaagctgaaaaagttgtgagtttatgctttcttctcgttaataagaattaagctctgtatcacctagatttctcttgtcctaacatgggtattcaaaaacagacatctgtagtgtatgtatggaatggcacaccccttgtttacctgttattggaaactagagaagtgattgttgggcaacgctttatcgttacattgtgtttaatttgatgaagattctgtg

SEQ ID NO: 321 - DNA, 362 bp, Bos taurus
  Clone ID: 39-BOVMS1-003-Q1-E1-B12
tcgtttttacaccattcagatccaagatggaaaattcaagattaagtgtaaactccgggaatggggaaagtgtacatgtccccaatgggactcccaacgttaataatggcagattgcaaacaacctcctcaaaaacaatctctcctggcttcctcagcctgggacaactctgtttgcaacaggattctgaaaaaaaggcatcagcaggcagcttactggtccatggttttctcaaacagatgaaagaagaaaacagagttcaatactttcactgttgcttcctctttgtcacaagccatcaatatcactgtctccagcatcaccgtggactgagccagaatgtgattttcctgatgaaaaag

SEQ ID NO: 322 - DNA, 419 bp, Bos taurus
  Clone ID: 39-BOVMS1-007-Q1-E1-B12
gtcgaccgacgcgtccgcaaaatcaagaccagttaaatgatttctccaaggtagtatcaatactttgaacatacgggtttaaattatttcttctatagtcctctaagtggaattaccaatttaaagacattaattctttaatggcccattgctaggtagattttctgaacaatcaaataaaaattgcactgctgcaaattatgtattactctccctgccctccaaccccaactgccaccaaccagtgcttctaattttgagccttaatttatttaaaagttttaattgttgtgtaattgtgccccacaatgtccattttcatatcaaagaagcctagcaaggctgtgcatttttcattttggtaatttgatatttgcaagtctgcatgtgtaaatagtttgtcgatgattaatagttta

SEQ ID NO: 323 - DNA, 63 bp, Bos taurus
  Clone ID: 39-BOVMS1-008-Q1-E1-B4
attaaatacccaaaaaaaaaaaaaaaaaaaaaaaaaaaaaaagggcggccgctctaaaagata

SEQ ID NO: 324 - DNA, 489 bp, Bos taurus
  unsure (327),(434): unsure at all n locations; Clone ID: 39-BOVMS1-009-Q1-E1-B4
gggtcggccacgcgttcgggctatcataaggggttccaccaaataattttggtggtaaaaatggggataattattttggtgttaatatggtgataattaaaagtcaagggaaattttaaataataagaaatctgaattaatcaacttgaattaagccaacatgcttaagttaaaatgaaagttgcaacaatggtaaactgagaaagttttccagttggtacaaatttggatttttccttccctgtgaaccttccctgttgtcctgaaacataacaaaaaggatactgcatctcttgttgtattgctgaggttattgaagttacatanaacacatctcagtctctgtttcttggaaggaaagtcctgctagttgactgacaattctaagcagggagaattaagataaatgtgtttaattaatgttttgcacacanatgcagaattttgtataacacatgacatcatagttgtgatctcaaaaaaaggact

SEQ ID NO: 325 - DNA, 66 bp, Bos taurus
  Clone ID: 39-BOVMS1-014-Q1-E1-B4
ttttaacagacttttccctagatacttatttaaatttttcacgctttcaatactcaatttagcact

SEQ ID NO: 326 - DNA, 293 bp, Bos taurus
  Clone ID: 40-BOVMS1-006-Q1-E1-B12
ctttacggtcgtgacttacttaggcaagcatgcaactcttcattgcttcaaattttgatctgtgaaagtttattttgattgagaagtccactattatatacttctcttgctgaggaaagaaccctggcggtatatctaatctattaccatacctgccaacatatgtcccatgcagtatatttgggtccaatcttcaacatagattgtaaaatgcataacaactgcatgggaggtatcaataaccctatatcacagttgagcaagcggtccaaagtgcaaacttggtaagtggc

SEQ ID NO: 327 - DNA, 449 bp, Bos taurus
  Clone ID: 40-BOVMS1-007-Q1-E1-B8
gggatactccattacacgctgctgctcaacagtcctgtacagaaattgtaaacttactgctagaatttggagcggatatcaacgccaaaaacacagatcttctgcgacctgtcgatgtagcgacttctaatagtctggtggaaagattattgcttcaacatgaagccaccccaagctctctgtgccagctctgcagactctgtatcagaaactacatcggtagaccaagattacaccttatcccacagctccagctgccaacgttattgcagaacttcttacagtatcgataagggagtaaaataattctaaatgtctgaaaatcataaatttctatttcatctgcatagtgtatatttcatattaaaacatgctaaagagatggtagagatatgagaatacccgggaagttagtgaaatagcaattttagttaaagtgtactagtgca

SEQ ID NO: 328 - DNA, 444 bp, Bos taurus
  Clone ID: 40-BOVMS1-010-Q1-E1-B12
ggagatgccattaagatcatccggcagttgatggaaaagtttaacttggatctatcaacagttacacaggccttcctaaaaaatagtggtgagctggaggctacttcctcctttttagagtctggtcagagggctgacgggtatcctatttggtcccgacaggatgacttagatttgcaaaaagatgatgaggctactcgagatgcattggtcaaaaaatttggtgctcagaatgtagctcggaggattgaattccgaaagaaataattggcaagatagtgggaaaaaaagttgggcagataagacattaacgtttttttgtgtgaccattggacttcagaaatttttacattggaaccgacactaatcttttgaccagttttgttgcactgtgagtcctagattttgtacccaagcagagttgtgttcggtccagtcgctcag

SEQ ID NO: 329 - DNA, 443 bp, Bos taurus
  Clone ID: 40-BOVMS1-016-Q1-E1-B8
ggatgttgtgtgggtgtgtctgagtgtgtgtgagagcaccttggaagggactctgcagatactgtaaatacccgtaccgttttaataaagcatgtacaataaaccaaaataagcttgagttggactttatatacaaactgtaaaccagtgcattataatatggtagtcaaggttgtgtatttgattcaagataaggaaaaatcttggaatgaaaggcagacactggttaaccaagttgtacacattgtaccacattcactgtaactttaggaagaaattccactttgtggaacattctcaagagatctgagattattcaagtaagaatcgatatattaaaatgtacatatttttactttatattttgatgccaactgattatactagaagtaatagcacttcaagtggtagttactgaacacaataaaggatattatactgat

SEQ ID NO: 330 - DNA, 395 bp, Bos taurus
  Clone ID: 40-BOVMS1-018-Q1-E1-B12
ggtataaagagcatctaggtggtaaaaatgttccttgttctcgtctgtgattttctcatttgagatatatttatggttataaattatttgctattttagcataccattattgatggtatgttaaatattctgtatatttctatttacagaaaatatatttctatatttctgaaagttagagtctctaaggacatatacagactccttttaacatttttctgaatgaacagttttagtaatgaatgaacagtcttagtaatgaatgactccttagaaatattaggactttcaaagagaaagggacttcagaacacattactgcatgtgacaccacttaatggtaaagaattaattgttacagctgagtccgatgcaaatgggtatatatgttgtat

SEQ ID NO: 331 - DNA, 424 bp, Bos taurus
  unsure (355): Clone ID: 40-BOVMS1-019-Q1-E1-B8
gcttaactcagtgggcctgtttctttaatacaaataggtggattctactctttgatcactaagaccactgtcagccctaacagggtataaaaattataaacttacccatagggtatgatactagttatttgctgaagaagtcagattctcaaatactgtcatttaggatgacaccaactaggactgaaacccaacaaatccatataggattccttcctggttgggtacaggcatgccgagaagtgtggcaatgcatcccagcgtctcaggggatttgcatgtttctttaaaaaactgtgaaatatcaagacaagattcagaaatgtgagcaaacttttaaagcaccaggtaatcnctacatttttatttggttcattttcagattaacttccaaataaatacattctatagttgcaatcatttt

SEQ ID NO: 332 - DNA, 443 bp, Bos taurus
  Clone ID: 40-BOVMS1-021-Q1-E1-B8
gaatagcttccattgctcctgttctatcctagtgctaaagaaaagatttaagtattctgtcaaactgggtaaatagaaaaaatatatataatataatcacacatcaggtatgtatcttgaacaactctaataataatcatagtaataatagcttaatgattattcaggattttctgtgtcctaagcagtctggttttacatgcatcatctcgttttgtccttgttacatccgtgtgagatgggtattatctcatattacaggtgaagaaactgaagcccagagatacgggacagtttgcctgagtccacagcaaaaaaagtcatagaatcaaacctggttctctgacttcaaattcatagcccattgttcttaagtgttggacataatttcctctcattaatacaaattccataggttgttacctccaataattggtattgag

SEQ ID NO: 333 - DNA, 428 bp, Bos taurus
  Clone ID: 40-BOVMS1-023-Q1-E1-B12
gaaaaccagtgcccttccattctgtatcttgagcttgtaaatgccagtaatttagagctaggacttttcccctcttaactctaggaggtagactatgttaattaaaggatcgcttaaagaaggcagatttttttcactatttgggttgtattagaaagattcctcctatggggaaaaactagcattataaattttccaaacactgaggaagaaaatccactgtattatgaacccagaagggtttgttgcacttttcctgcttttttttaaggcctgggtaacaatatcaccatctcttttttacaaaagggcaaatgaactgcaattgagagaagctttataggttcagtggttagttgtacaacatgaaccatttagcctcttgctttccatgggaatttgggcttactaaggaaaaagctgtttgt

SEQ ID NO: 334 - DNA, 342 bp, Bos taurus
  Clone ID: 40-BOVMS1-023-Q1-E1-B8
ccacgcgaccgcctgtatgtaatctactgaatgtttctgaaaaactatttctctttttttgtgttcctgagtacttggcagatgttcatttagtgggaattctgacctaccacatggatgaacttgaaattaatggcaagggaaaaaaaaaacgaacttattttcttttaaagaaagaaacttaaaaaagagcataagtatttctaaaaagccattgaaaggaagcatgctgtttgtaatttagaaatgctttttattcactgataagtattcacttttttacagcttgtatcaaaacaaatgattttggttttctcaataaaggcaaaacaggttgacacc

SEQ ID NO: 335 - DNA, 421 bp, Bos taurus
  Clone ID: 41-BOVMS1-001-Q1-E1-C2
aatttatttataacctgttataagtgctatatctgtttgcagttaggaaatgcagaattcaaagtgatctcctaccttgtaagcaaactgagatgcactatcccttttctattaaaataaaaatcagttaatgtgtcaagaaaccaactctagtgaagtcaggtttaatattagcctttcttatgtgtttcatctaattattttggttgttaatatggtgataattattttggttgttaatatggtgataattaaaagtcaaggtaaattttaaatattaagaattctgatttattcagcttgaattatgccaccatgcttatgtaaaaatgaaagtggcaacatggttaaactgagaaagtttctcagttgtaacaattttgattttttctttcctgtgaccttccctgttgtcttgaac

SEQ ID NO: 336 - DNA, 347 bp, Bos taurus
  unsure (39),(100): unsure at all n locations; Clone ID: 41-BOVMS1-003-Q1-E1-C10
gtcggcctctagggtcgaccgacccgtccgggaaaatancagctttcccagcaacccaaggacccctaaagaaacaagtcccccaaggagatgtctgtcnctcatgtggtccatcctttggaggctcacacagcacttcttgactggctccctgccttacgtggtggcctgccctggggtctgctggacacaagccacagtgttggggtagacaaggaagataaacgaggggcttctccctctccacagagactctggattttcattgttcctccagttttattgtacggcttaacattcccctcaaaaaagctcatcttctaatgcttggtctttgtttcaagaaa

SEQ ID NO: 337 - DNA, 452 bp, Bos taurus
  Clone ID: 41-BOVMS1-005-Q1-E1-C10
gtgagatttataatttactgaaatgagttactacggaaatttggaaattcttccttggagcagttttaaatgtgatgacttttgtttgagaataaacagagttactttcttggaaggaggaaaagaaggaaatctatcattacttattgccaactttgtcctaagcagtatatttggttccaatcttcaacatagattgtaaaatgcagaacaactgcaggggaggtatcataacccctatatcacagttgatcaagcggtccaaggtgcatagttggtaagtggcagaacatgaacatgaatcttactgtgttatcaaaagaccaatgacacaataaatgtcaaaataattccaactccactgaaataactgcttgtgtccaccggaggcaactttgcttccatccttccttcaattcctcctccttccaatttgtctcatcctttgaata

SEQ ID NO: 338 - DNA, 414 bp, Bos taurus
  Clone ID: 41-BOVMS1-006-Q1-E1-C2
ccaagatttaccataatatcttttacttgaaagtcaataatatacatggaattgatactttaaggaaagaatagggaaagaaggaaagagtagaaaactaagacattgatctgataatacacattgaatgcctgttaaccaactgattttatgctattcacttcacagcacatattctcccatttaatcctcaaacaattcagttaaagaggtactattattccatttcacaaatcaggaaattaagattgaataaggtataagttttacaagcttaaaaagctaataaatgatgaaataaaaattgaatccgtgtttaactcctgagaattttccactacacatgccataaatctgaagccagttacagagcatatttatctggaaaggaacttttaagggtggaccaaattc

SEQ ID NO: 339 - DNA, 101 bp, Bos taurus
  Clone ID: 41-BOVMS1-011-Q1-E1-C10
cgaccacgcgtccgatcgcgagcggccgcccttttttttttttttttttttttttttattttattatgttcgtttttttattttatgttgtttgttttttt

SEQ ID NO: 340 - DNA, 453 bp, Bos taurus
  Clone ID: 41-BOVMS1-013-Q1-E1-C2
tcatcagacgaaagtagcatctgtgatgtctcttagacattactatagagcagtactatgattatcatcagtaaccttcgactcatgctcgaacaccatattatgctacatcactaggccgtctatttaatcaacgctcatcgcagtaatttacacgcagttgtggaaagtacaacgctcgctgaagcatattgtaccatcatcgttcatggtggtgctgtttaacacattgaacccacagattgaccttcacagtagtcgctacattattaaacgcatagatttattcgcatgtacgtaaattcacccagctatgtgtgggtattccaatgttgatgtcatgtgagttagtacagtataggacgcgtgctgcgtatacgtggatgatttcgacacatgtgcgcgagattactatcatggcctgtagtaccaggcctgtctttggggatccac

SEQ ID NO: 341 - DNA, 425 bp, Bos taurus
  unsure (248),(260): unsure at all n locations; Clone ID: 41-BOVMS1-014-Q1-E1-C2
atattattaaacatgctgtacatactttttgtgtttattgggaaaggaatgcaaagataaaggtctgttttgtgtatttttaggactactttggttactttttggaagttgatattgtaaaagaataaaccaagaattgattgggaacgtcatttcaagaagtcccctctcctccacatttgttttgccagtttgcacattaaatgactctttctcctcaaatgtgtattatggggcaagaggggtanggtaagatatangcagttgggttttttcaagggccctttttcagtaactggaacactctacaacaaagagacttatttaactagatgacagtgactatttttgtttttaataaaaggaagcttacatgcctaacaaggtttaatcttttatgattgcctttttaaaactttttgtaa

SEQ ID NO: 342 - DNA, 197 bp, Bos taurus
  Clone ID: 41-BOVMS1-016-Q1-E1-C2
gtcgcattccgggtcgaccacgcgtcggtctgtcgccaatctcagcgcagcatcgggagctctggctactggagctcacctggagctgttgctttttctctactcatagcaacacatattagcagtggtggccttagtataggttccatccaagccatattgaaatcgatttgctgaagaatggggagaagattaaa

SEQ ID NO: 343 - DNA, 342 bp, Bos taurus
  Clone ID: 41-BOVMS1-020-Q1-E1-C2
aaaaaaaaaaagataaccaaaagaaaacaaaaaataataaaaaatacataaaaaaacaaaaaaacaacaaaaaagacaaataaattcaaatcacagaaaaatcaaaaaaaaaagggggggccgcccccaatttaaacctgaccccttgggaacctttcaaaataaaaggaacattcccctaatttttgaaaaactaaaaccccaacttagggcagccaacggaaggttaaaattttcaaaaccaaacccatctgttttggaattgccaaacacccaattgggaatccaaccacaaaattctcaaaatttaaccaaaggattaaaactccttcaaaaactttc

SEQ ID NO: 344 - DNA, 321 bp, Bos taurus
  Clone ID: 41-BOVMS1-023-Q1-E1-C2
ccgtccgaaacagcaaataagaaaacaaaagaaatgtatcaaaaaaactagatcacaatacttagtgttcctgagtacatggacaacatgttcacttagtgggaattctgacctacacatggatgaacttgattcttagtggcatgggaaaaaaaaggggggggctccctcttcattgtttccatctttccttaccctcgagtggaagtacttccccctttccattggcccgaaacatgcagtttgtgggccaccgtttcaaactattcactggggaatactcacgtttttaccacttgtatccccccgtatgattttccc

SEQ ID NO: 345 - DNA, 151 bp, Bos taurus
  Clone ID: 42-BOVMS1-001-Q1-E1-C6
tacgaattagtcctgagaacgagtgtctcacgctgaaaccttgggacctgtgtttccagcacaggttgtgacagtgagtggaaagatctgtcttggtgaaggagcatgtccccatgttggcaaaactataaagaataaacggatcttgaat

SEQ ID NO: 346 - DNA, 455 bp, Bos taurus
  Clone ID: 42-BOVMS1-003-Q1-E1-C6
ggacaaatgaagccaagttggatgagattttaaaagagatcaaatctataaaagacacaatctgcaatcaagacgagcgtatttccaagttagaacagcagatggcgaagatagcagcttgaaggtccaccccaccccccagatgggagcaggaaggcgtggtcccggggagggcgaagggaggcactgcctttggagacattccatttcagatctgtcgaccagcgacaggccacgttccagtaagaactcaattcgtctcccaaatttgcagaaacaaaatgtgatttaaaagctgagctttttaccagaaaactttttttgatgttttaagtgttatgtgacttgtgaacttctaaaagacaaaagtgctactttgagaatcccagatattctgaattttagaaacccaaccaattctgattcagtgtcctgcccaagcaccttttttttcc

SEQ ID NO: 347 - DNA, 58 bp, Bos taurus
  Clone ID: 42-BOVMS1-004-Q1-E1-C10
aaaaaaaaaaaaaaaaaaaaaaaaaaaaaaaaaaaaaaaaaaaaaaaaaaaaaaaaaa

SEQ ID NO: 348 - DNA, 498 bp, Bos taurus
  Clone ID: 42-BOVMS1-006-Q1-E1-C6
acggtcgacaatccgggtccggcacgcgtccggataattttctgagaatgtcagaatgaaaataatggggttatcccatacttgagagtattgttcttttcaggatgttgtagttattttagtaagtgaccaaccaaattgtgatttgacttataataaagctgaaaaagttgtgagtttatgctttcttctcgttaataagaattaagctctgtatcacctagatttctcttgtcctaacatgggtattcaaaaacagacatctgtagtgtatgtatggaatggcacaccccttgtttacctgttattggaaactagagaagtgattgttgggcaacgctttatcgttacattgtgtttaatttgatgaagattctgtgtagaaacagtctttcacgtgtcatgttttcagccactaactgccatcacccactggggtcctttgttaagtcatcttccatggctaataaggataatccaggtaacttttcagagatg

SEQ ID NO: 349 - DNA, 239 bp, Bos taurus
  Clone ID: 42-BOVMS1-009-Q1-E1-C6
cagatgatcatctgcgtgttcctggagaaggacgagaacatctaccgagaacgcctcccccactacttcccggtcgcgtgatgctgcccaccctgaccaggactgactcccctgggcctgccggaccacgctcccagctctaagtctccgaagcctgcagtggggcctggcggggccaccctatccttcccctacaccctccgccccgtcaggagcctaataaagaccactactgctgc

SEQ ID NO: 350 - DNA, 105 bp, Bos taurus
  Clone ID: 42-BOVMS1-014-Q1-E1-C6
gccgaaggaaagctcaacaatctgcggttgagaagccctgaagaacatatcaatcccagtccttcatgtttatagtcagattctgatcgtgaacatcttcataca

SEQ ID NO: 351 - DNA, 455 bp, Bos taurus
  Clone ID: 42-BOVMS1-016-Q1-E1-C6
gaaaaatccgaatatggaatgaacttgtcctaaagtgacatacgatgagctgaagctgtgtttggtgggaaggcctttggggaaaccaagcagtcgataacatttaggatggtcagacttagtgaatcatttaaaggcattcagatattatctaggaatgttttccaccacacagggtaatgcatctcatggctgtttccaaagggtttattgatggtaaaataagtgactttaggtgtaagagggaagaagctcttgggtttttatttaatagaaagggtttgaagctgtttgaagctttgaaatgtgaacttttctttatgtccggtcaaaacgtcaggggtagcctgtagctcctctgtgtcaattctgtttctttatccagagttttaaaatggtggcatttccaaaaaaaataaaatggtggcatttccaagcattaaaagtttagaaca

SEQ ID NO: 352 - DNA, 407 bp, Bos taurus
  Clone ID: 42-BOVMS1-017-Q1-E1-C10
ccagcttctgcgctgtatgccagttttttgcctaaagtttattttgagcccacacctttcttatctttgggttgagaaccatggcaaaaaaaaaaaataaaagcaaggtatcttttgtgatcaagtaaatgaaagcttgctgactgtcctagatcacaggagaaaacggaggaatgaaatcaaatccaaatatgagactaaagatgctaaccaaaggtaggtactaagtggaattctatcagcaggccactataaatgagaggaggatagagaaacatgtaccaggactttgaagggctgtgttattttcccaaagaaagacttggccaagggcggaagccatggcttcattggagagcacttcctgtgggtttccattagcatttcaccaacagtggacacacatg

SEQ ID NO: 353 - DNA, 287 bp, Bos taurus
  Clone ID: 42-BOVMS1-017-Q1-E1-C6
ggtttacttccagtgtctgagctgtggctctcacccccagagctcagtttatagttaacagcgcactgatggactgagaggatgcgcgtgtgtgtgcatgagcgcacctgtgtgtattctggggtggggtgtttatttttagtaccccatgctggggttctctgatgcagtgtgggtgttcaaacacggtaccttctaaagtgtagttcttttaaatatagccaatgctggaaaatgtgaaaaaaaaaaatgaaaacagagtataaaaaataggatatgtggtgatt

SEQ ID NO: 354 - DNA, 424 bp, Bos taurus
  Clone ID: 42-BOVMS1-018-Q1-E1-C10
gtcacatctcgaggaaaagaaaacaacagaattctagagaaaatgtgtttattttgatagcaatacatcattcatgtcatttttagtcttcctaaacctgtaaaaggctgtttaaaatttagcgatttgaaggcattatacctaagaaatcacttaaacatttttaaagctactgagatgaatttatttatgcacttcagaggtgctaaattttaaaagctgaaagacaacagaattctaagaagtatagtcaaaaatgttgcatgggttgcagtaatcagtgtttaaaggattcagtttcattgctgacgtactttaccaaccaaataaaatcttgtcagtggctatgttaattcccatgaaagttaagcaagatgctattaataacggctcttctcttttttttttcccccaacttacaaat

SEQ ID NO: 355 - DNA, 305 bp, Bos taurus
  Clone ID: 42-BOVMS1-019-Q1-E1-C6
caggaatatctgcagaaacttctgcaacatccagaattgagtaacagtcaacttctggcagattttctttctcccaatggtggggaaacacagtttcttgataagatactaccagacgtaaatcttgggaaaattataaaatctgttcctggaaaactaatgaaagagaaaggtcaacatttggaacctttcatcatgaatttcattaattcttgtgaatctccaaagcctaaaccgagtaaaccagaactgaccaatctcaggcctacatcagagaataataacaagctttttaatgatctgta

SEQ ID NO: 356 - DNA, 270 bp, Bos taurus
  Clone ID: 42-BOVMS1-022-Q1-E1-C10
cctgtacatagcacaacatgatccggataatatatatactgttcatgtacatccacaaatacaccttgtaccaaataatgctttcttgtagtagaataagaatcgtgtaaattctaaaaaattttagcaggttttctttccctattcattgtttcttatcagttttaaaagactccttaaagcatgtcagataaaaagcaattaggattaaaagtttccatttaatttcctttaaaccattgaggcttcattaaactctttccacttact

SEQ ID NO: 357 - DNA, 427 bp, Bos taurus
  Clone ID: 42-BOVMS1-023-Q1-E1-C10
tattactccttggtgaaacagtatgcttcttagaagttagaatatacttggaaaaagttactccttgggaatatactaatctttattaccaactttattaaaatgagatacttggcctgggactgtttttttccacatatggacattcttcattttctgaacctcccaattgcaaatattttgcctcattatcctcatcggtacatatgtcttggcctgggactgtttttttccacatatgaacattcttcattttctggacctcccaatttcaaatttttgcctcattatcctcataggtacatatgtctttgttagctcatgatccaatttttgttttcaggactgagggacagaaagatataaagattaccttagtattttcctttgtaagcaatcagtagaatgttagagggtgtaaaataca

SEQ ID NO: 358 - DNA, 387 bp, Bos taurus
  Clone ID: 43-BOVMS1-001-Q1-E1-C4
aagaaaggctgaatcctgcagctgtgcattgaatacactgtgggaaatggatccatgccctgaaaggtgccaagaaaatcttcataatgtcacagtagaatagtctttgcggttaaaaattttaaagcctatttcattataagtaactttctcatgtgtatttacctgctataaatagatgtacgattgtatctatttcatacatgttttaattggaccatagattagaagtgatacggtcagcttgttaccgattccatactagtatgttatctttaattctggaacttatggagaatagattctttctcagtgtctcacagtgactacttattaaattttgttattgtacactgaatatacattattgcttaatgaatattgtat

SEQ ID NO: 359 - DNA, 314 bp, Bos taurus
  Clone ID: 43-BOVMS1-003-Q1-E1-C4
aaaattttaaaaaaaaataataaaaaaaataaaaaaaaaattaaataaataaaaataatatttaaaaattataatattataatagttaagttagatagggggttagggattatcaatcttccatataataggggggggccccttaagggtttcaatttttatttaccctcagatgcagtttaaattcttttttatgtgctcccaaaattttttttccggggctcctttttttaaacgtttcttctgggaaaaccctggggttaccctattttttcccttttgaacaatttccctttttccattttttgtttttt

SEQ ID NO: 360 - DNA, 108 bp, Bos taurus
  Clone ID: 43-BOVMS1-006-Q1-E1-C4
gtccggctgaacaaactggcacttgcttcatccttctatatccatccactcctccctctactgtcggcctccacactctctgctgcttaataaactccatttggtctc

SEQ ID NO: 361 - DNA, 226 bp, Bos taurus
  Clone ID: 43-BOVMS1-009-Q1-E1-C12
ctccctcacattggccttatgctccttccgtcctcggcgttatgtttctagcttcgttcactcgtcgtcggtctacatgtcgttggttgctgtggcctttcttgttccccacgttggtggccttgcacttttccttacttgcccaagctgacgttctacatcttaggcctcatcagctatccgatcaccgatcttacctttccgtcgcgggctacggttgtccttt

SEQ ID NO: 362 - DNA, 462 bp, Bos taurus
  Clone ID: 43-BOVMS1-010-Q1-E1-C4
cactaagtccttttccccaacttcctaaccaaatccggtataaaatttgcctaaggaaaaaaaaattaaaaccttccaataactttccaaaccattttcctgctatttcgaaaaacgaagaggatgaacatgttttgtgctatttggtagcccacaaatgttaaaccaagagagaacagtaaggagctagactgattcaatggatttacatgtgtttttattgtttttatgggagtaaccttggaaaaggaattcttttcgtaagtgcagttgggttggttggttgaagcttaagtgaaaataatgtccttgtgtaactgggaaaatattttctttatcttattacatttcccaaggttactttaaagttcattattatgtaatgttcagagtaggttgtaaacgcttctaagtaagcaaatacagaggcaagataaatagaaatgactttattagaataaa

SEQ ID NO: 363 - DNA, 341 bp, Bos taurus
  Clone ID: 43-BOVMS1-011-Q1-E1-C12
ctggatgtggcaaacattaatggattaatgagcgggttctttcaagctttggagctgtgagcagaccattgtcaagaagactgtatgactttccttctgattcactgttgttgacatcagtaatgcaaatgtatgataagtgggagtttaaaatattttcattaagttgtatatttttacatatcagtgagatatgtatagtagaaatggaaaagaaaaagtttcaaaaacaagcttgaagaaatgctgcagcttcagaagaaagctaagcagcgttctttatggttgtgccaccacacgaaggaagaggttgacattcttatagaaacatcgtcaactgt

SEQ ID NO: 364 - DNA, 130 bp, Bos taurus
  Clone ID: 43-BOVMS1-015-Q1-E1-C12
tatttatgcagctaaagcagaaatatttgagatgctcaaaaggaaaagtaacaattgactcttttttcaactaatctttttctttgcctataaataaaactaggaatggaattaacaattatagaagtag

SEQ ID NO: 365 - DNA, 138 bp, Bos taurus
  unsure (10)...(11),(17)...(19): unsure at all n locations; Clone ID: 43-BOVMS1-016-Q1-E1-C4
aaaacagcannacacannnaagaagttgaagaatccactctctgctatccaagcaacacgaacgccccttcctcacaccccatgaccctgtgccttgcaccaatgcaccaagtggacaataaactccaggagtgagca

SEQ ID NO: 366 - DNA, 76 bp, Bos taurus
  Clone ID: 43-BOVMS1-021-Q1-E1-C4
aaaaatgtcccttctcaagtaggggagtgacacctgctttaataaaggatttctcacactacaacgaacattaaaa

SEQ ID NO: 367 - DNA, 443 bp, Bos taurus
  Clone ID: 43-BOVMS1-022-Q1-E1-C4
ttcggatttttgtttgagaaaaaaagaaatctgccattttaattaatattgatcagagtctaatgactatttatcttatatcgtagatttgataaccctatcaaaaaaaattacattctaagtgtaatcttacatagtgcttgtattgttgcatttgttttaacttgtggaaaagtattgtatctaacttgtatttctttggtagtttcatctttatgtattagtgatatttgtaattttctcaaccttaacaatgtagttatgctacaacttgcctaaaacattcaaacttattttcttttttctttttttctttgttaattcacttaaactcattgaaaacgtagtatacattactaaaacataaattatgggaatcaccgaaatatttttgtagtagactaattgttgttacattgtctttcttttttttcttttgtttc

SEQ ID NO: 368 - DNA, 324 bp, Bos taurus
  Clone ID: 44-BOVMS1-007-Q1-E1-C8
agagacactggagggcagctgtcctgtgcggtgtttttgtttccagcaccgaagttatgagaaatattgtgtagctgctgctcagtcccaggtgcattctgcccctgcccacctcatggtccccccttcaaagattgtgcagctccttaaataataaagctggaaaatatttttagtcatcaaatttgatttacaaaaaatgctaactttgaaatgcaaacaggcttgaaaaatgtattaagtactttgtattctggaagcgtgaattgcttttgaagtctgtcagtattattagtatttttcaataaagaataatttttctcc

SEQ ID NO: 369 - DNA, 356 bp, Bos taurus
  Clone ID: 44-BOVMS1-012-Q1-E1-C12
gttttcatgcttctgtcctctcctagaaccagaacagctttcgtatctgtgccaggctctagttcaccagctatgtatccagtcatcatctcattcacatttggcttcacttggtgacagtggccatagctaagttatttggcatgtttgactttcaacagtaacaaaaatggttttggattttatttcctaaaaatgtatacgatgttgaaactttacattttatatactagtatctggctattagtattttacaggaaccatagttcttggtgactacatatatatatatatatatatttttgtgacttttttgtatactaagtgccgtttcaatgttacaatcatttttagag

SEQ ID NO: 370 - DNA, 324 bp, Bos taurus
  Clone ID: 44-BOVMS1-014-Q1-E1-C12
gaaaaccagtgcccttccattctgtatcttgagcttgtaaatgccagtaatttagagctaggacttttcccctcttaactctacgaggtagactatgttaattaaaggatcgcttaaagaaggcagatttttttcactatttgggttgtattagaaagattcctcctatggggaaaaactagcattataaattttccaaacactgaagaataaaatccactgtattatgaacccataagggtttgttgcacttttcctgcatttttttaaggcctgagtaacaatatcaccatctcttttttacaaaagggcagatgaactgca

SEQ ID NO: 371 - DNA, 129 bp, Bos taurus
  Clone ID: 44-BOVMS1-014-Q1-E1-C8
agattattattgataaagcctcatttgagtgtgtgaattcaatccaggctatgtaaaatttttgccaatgtcattgttttgaaaaaaataaattcacaagtacatttaaaaaaaaaggaagtacaaaaa

SEQ ID NO: 372 - DNA, 375 bp, Bos taurus
  Clone ID: 44-BOVMS1-017-Q1-E1-C8
gtttagtgcatttttaccttgtgtatagatcttattacaaagtgattttctagattaaaaaaccagactgagctgaaattgtatagttcttaactgagggcatttcagaactctgggattattttaatcttgaagtagtggatggtatagtaataaaaccattcatcgggttcttgattgtaggatttaaatttctggctttatcttgataactgagaagacgtaaatgtttttgtgtagatatcattcactgtatcacctgctaaatctccagattaggtataaactttgtcgagtgatatgacttggctttcattctgtttggtgttgagatctcgatgtccatatagtactgagtgcacgttagtactgttc

SEQ ID NO: 373 - DNA, 429 bp, Bos taurus
  Clone ID: 44-BOVMS1-018-Q1-E1-C12
ggaaatacttcatttttatgtaaatacattgtaaataaataggaggctgtatatttttgaagttgttgatccacattgaaatagaagttgctagtatctgcatatcaagaataaatgtcttcattgatactagtggttttgtttgggaattagaaaaatttacattctctcccaggtaacatagttctcttaatgtaaacttggaacctacaaatcttacttgtttagagagagaaatgtctgagaaatagttaacgttgatttcttatactggtattaagattaattatttcaaagctagtcctctgagctacaaataaaaaggaacattttagacccaaattattgccgtatagaaatagaatacccaaaataacaagttgtttctttgcaatactgtttcactggtaacactgatactactacaca

SEQ ID NO: 374 - DNA, 63 bp, Bos taurus
  Clone ID: 44-BOVMS1-020-Q1-E1-C8
gggggagggcgtcacagtctgtgtgggaccagctcacggagaataaacactgatgtgactgtg

SEQ ID NO: 375 - DNA, 305 bp, Bos taurus
  Clone ID: 44-BOVMS1-022-Q1-E1-C12
gcgaactctagcactattatgatacatatgagtttgcagttgctgagtacactgctccatgcagcacagatgacaggtgtcgcttaacgaccatctcaacgtccctcgctttgccggactcgctgacctacaaaatcaaatcgccatgcaaggtacacaatttttaccatctctgattgattgctgaataacccaccaattaaatgcatcaggccacaatgaacactttgccagagttatgagtattttatcacacacatggtggccagcatcaacaagcatctattcagatacatttccatcac

SEQ ID NO: 376 - DNA, 260 bp, Bos taurus
  Clone ID: 45-BOVMS1-001-Q1-E1-D10
aatgtgatacttgaagagataaaagggatttaccagcccttaattgaaatctaagctttttatcacttattttttccttgccccctgtcctccctcccacctttctccttgcattgtgatgatctagtgggcacgtctgtcaacaggacaaatgcctcttctgactataacctcttaatagttgtgtataatgaaaaactgtaaactttttttaaataaaatgtgtatataccttgaaaaagaaaaaaagaaataaaaga

SEQ ID NO: 377 - DNA, 384 bp, Bos taurus
  unsure (105): Clone ID: 45-BOVMS1-003-Q1-E1-D10
cgaaatttttcttgaacttaagggagaaaattttaaagaaatctgcagccagctgcttcatttcactttactgtttttcagagtcacttatactaaggaatagangaatgcttttgtgtttattgacaacatgcttaattttccataaatatgtcagcaagcttttttttaactgcatttatcttccttttttggttttcattattaaactctaaaatataatatcacttattggaagaataatttcttgaaccatgttgtgttttaactgatttttcttatcactatttctcccaaaagaaattatccctaaatgtaatggtaagttttacattcaaatttatttaactttttgacttatgaaggagttaaaagaaagcattc

SEQ ID NO: 378 - DNA, 149 bp, Bos taurus
  unsure (17): Clone ID: 45-BOVMS1-006-Q1-E1-D2
gtccggcaacacgggtncgccgacgcgtccgatgataccaatagtcaagctggtgtatttgttgatgtcaagacattttgaatggctagattgtaacataaatttttaataaagtgcccactgcaatttttacaaaattcaattcacaa

SEQ ID NO: 379 - DNA, 85 bp, Bos taurus
  Clone ID: 45-BOVMS1-008-Q1-E1-D2
ggaaagaaaagcctggcgggctacagcccatggggttgcaaagagtccgacacagctgagcatagcacagcattctctctctttt

SEQ ID NO: 380 - DNA, 464 bp, Bos taurus
  Clone ID: 45-BOVMS1-010-Q1-E1-D2
cggtccggttatcacgggtcgagccaagcgtccgaaataaagggtccggtaagtcctgggaacaattaacaatttggagggtaacaacaagttgattttaataaaattgaaacttattgttggattataatccattatttaatagcaaaaattatccagagaactttttagactcataaagtttctaagtaaatgtagtttttaaacatcttcaaaagtttctattttatttaaaatggaaaaaggattcgttttatagataattttacttttagaaatattcatatggtacacacatgtaattttatctgtggtttctcttaacatattacctatgcctttgctatgaagacacataacaaaattacatgcctccctggtactcaatgctgaatcaaactggttcacccaagtgtagaactctcctttctgtctttctgctgcactaattgcaaggggctggc

SEQ ID NO: 381 - DNA, 63 bp, Bos taurus
  Clone ID: 45-BOVMS1-011-Q1-E1-D10
acaaaggacgctctaacaagatcaaagcttaaataagcatgaaatgcaaaatcaaaaaacaaa

SEQ ID NO: 382 - DNA, 237 bp, Bos taurus
  Clone ID: 45-BOVMS1-019-Q1-E1-D10
ggagtaaggaatgttgtcatcgctggattttgagaacgaacaataacttctctgcaacatttcgtaattgagagaattcctgagttgatagctccaaatgcaaatgctgtatttgcctcctttaacccatttttcaacctgtttgttttttttaaggcttcactaacggttgatatgtaccaatgtatggggcacgttttaagtcagccattgcaaaaatcttcagcatgaacattt

SEQ ID NO: 383 - DNA, 189 bp, Bos taurus
  Clone ID: 45-BOVMS1-021-Q1-E1-D10
acgaactgcagcactattaggatacacacgagtttgcagttgctgagtacacagctccatggagcacagatacaggaaatgctgaaagaccaggacaaagaacacagctttgttggacacggtgaaccacaaaatcagatcaccgtggaagggacacaatttttaacatctcagagggctagctgaaaa

SEQ ID NO: 384 - DNA, 397 bp, Bos taurus
  Clone ID: 45-BOVMS1-022-Q1-E1-D2
acgtcggcttattcttgggtgcatcattttcttgcattttgtaaatttaagacagttagtagactgactcttggagaagcttcagaaccttaagtatatgtacccttatataccctaataggcttctattataagaatatactattttttgtttgttttcaaattccagtaaagcataccacatttaagaacttaaaaatttcctgtcgtctactcaattgatattcatgttaatattaaatatcttaagttgtattgggagtaatttgaggtgcagttatttttatcactactttcttcaggaaactaagcactaaatagacatttttacatgaagaatatatcagttgtgagtacgcttgtttcaacactattctaaccattgtgttgtgttttc

SEQ ID NO: 385 - DNA, 265 bp, Bos taurus
  Clone ID: 46-BOVMS1-001-Q1-E1-D6
ccgacgcgtgggaacaagcgtccgaaaaaaaaaaaaaaataaaaaaaaaaaaaaaaaaaaatataaaatgaaaaaaaaaattaaaattaagtggaagtcaattttaaagaataatgaatgaaaaaaaaactgaagttaaaaaaaattaaatcaaaatgggagaaattcgggggggctccaaatggggttatattttaatttgactttaaaggtcatttaaagtgtcacctaagttgacttaaaggggaattttatgggacttttt

SEQ ID NO: 386 - DNA, 437 bp, Bos taurus
  Clone ID: 46-BOVMS1-003-Q1-E1-D6
taaaaagctgatgtagtaactctgtctaaagactaatcaattttctgccgtctgtgatcaagcttggcatctggcgcagctgttcagaaaatattagaccggaggggtgcaaaaggatctaaccttatttaagctcctatgcaacttattgcgcttccaatagtcacaccaattttgaattgcaacggttctccaaatttaaaatattcttcaaggggaaaacccggtattcacccaagtaattccccgagcaaaacaacccccttatcaacagcaggtggtatcaaactggaactaggcccacaatatgtatttcccatccccagaaacttacacaacactgactggatactgggctgcacctggatccggtccatttgaccacgaggtattactactgttgccaaatatcaccttaaaagatgccgataccaaaa

SEQ ID NO: 387 - DNA, 147 bp, Bos taurus
  Clone ID: 46-BOVMS1-004-Q1-E1-D10
cgggccgaccccacgcgtccgaaattagctactagtcactgtatgacttagttgcatgcctgtattgtcactgattacaagtaaacgttacatggtagacccaaacagaagaaaaaaattgaacatgaacaacatgaaaaataaaaa

SEQ ID NO: 388 - DNA, 309 bp, Bos taurus
  Clone ID: 46-BOVMS1-004-Q1-E1-D6
aacaaatctggcctgttgaacacgggcagctagacactaaataggttgtacaagcacctttcattgaatttgagcagataagaacttgtcaacgggtttcatgtgttccagtatatgtgaagcttcaggcctgtgatttcacctgaagaagattgccaatacttctcttccacatagcacatgcattttcaattcataggtctgagtaaatcagggatgtctaaatacagtaaaaaccatagtctgttgctcaagaattttagtgagttagctgtattataatttatgtggatgatgaattattcacat

SEQ ID NO: 389 - DNA, 300 bp, Bos taurus
  Clone ID: 46-BOVMS1-013-Q1-E1-D6
gggtcgaccacacgacgtctggtttaccaagtttttcaaagacttttgctgttaaactatcagatacatactttttgtatgtgtattcaatcattttagcaacatcacgtctgaagtgatgctctagatcggtatataaattgtaatacagtttaatcatccactgacatttagactagattctgaatcacctcatacaaaagcaagtagtatatccataagaaagacatatccaactaagctcacataattatcccctcagtaatgagtccacttgagatgatagtatgagttgtcgac

SEQ ID NO: 390 - DNA, 351 bp, Bos taurus
  Clone ID: 46-BOVMS1-019-Q1-E1-D6
cttccaagtgtgggtttaattcaaaattatgaagatttatatattattttttattacatacaataaagtggtttagcttaaagtaaaagctttcacatttaaagtttttattttaaaaagatattttaaaaatgtagacccttaaaaaccagcaaaaaagctgaatatatcttgcagcgtaggtttatccttaaatattcacatctcaaatgctgtttagaaaaaagatttaaaaactggctaaaaatcatttacacttggcaatgattaaaatctcatctctgacagagcatattaatggcacataatgaatttactgtcacaagcatttaacagtttaatgggtacgta

SEQ ID NO: 391 - DNA, 455 bp, Bos taurus
  Clone ID: 47-BOVMS1-005-Q1-E1-D12
gaagaggaccttttaaagtgtggaacttttatgttacagttcaagctcaatggcctattagtcccttaagatacccatttctgcttccgagtaatgggtttttgctgtaaaattgtatcagtgccccagatgaaaacacctcttaaatcatgataaacaaaatagaaataataagaggaattttgtctggttttccagaaccagagtaagttatttcaagaaacccctcttaagagttgggtagtatgaactggtttgtgcatagtttagtatgtgtatgtatatagacacattagtatgtaatgtgtgtgtgtacacacagtcccacaggataccatcggcctcactataaatgaaggtgcaggtaaaacttttgttcttacgccacattgcagctttctcttaacctctaaagcgcaattgtgtcaatgccatgtcattgttaaatactcttt

SEQ ID NO: 392 - DNA, 439 bp, Bos taurus
  Clone ID: 47-BOVMS1-007-Q1-E1-D12
ggaaataagtttttaaatgttgaaaagtgcctgaaaattggttgatttcttaaatcgctcaacagtttgggttgtgtgagactgttggaatcaacaagaacgggttggttggttaacccaaatatatctctggtgcatcagagggcaagctgcaagccagtctagagattgtgtttatagtggggaaagctgacaactttgataacagactgatgctttcattttgtataactggccagagaaagggttgaaccttgtctccttcctgtttgtcagctctgttctttgctagtgatctctgtctgtcctaagagaaatatgggtctatttaatgatatttggatgtcgtggcaaaaatcttgtgtttggggtattgtagtccacttgaaacagaaattcaaaaaatccttcaacgcattgtcatctgaaaggaataact

SEQ ID NO: 393 - DNA, 271 bp, Bos taurus
  Clone ID: 47-BOVMS1-008-Q1-E1-D4
cgaacggacgcccttttttttgtttgttttatgttatttgatttaattcttcatacatgtgatattgttctttggtatgctccagtggtatgattattactgttctcattcttgggaagtttattcataatgttgatttgattttatttgttgaagaaaagtgcatgttttaagggggccttgacaacgggcattcgtttttcggcccactgcgtcaatctggtaaattagggggatatttttaagtgttcctttttctaggggcaaaagt

SEQ ID NO: 394 - DNA, 455 bp, Bos taurus
  Clone ID: 47-BOVMS1-012-Q1-E1-D4
aaagcagtgggatgaaaattgctttgatatatagcaggtaacattgaagctattccatagcacttaagtgtagtgaatactgtgtcaccaatcctgaaatcaatttaatgtttaatgcaaatccattacatggtgctattacaggctgacaaaatgatttacacaaatgtgacaacttgggctcaattcactctgctttccaacagtgtaaacgcatagcagtgtttatctgcatgagaactatgcactaatctatctgaagaaaaaaactatatcaactttggtatctcctttccgtttacttcaatccttgcctttttggtcattgttataatgccagctttaggacagaaagaattataagaaaaccagcataatacctgatatattaaaatgtagtgcctgtgaaatctgtattatattgctcttctgaagtaagatttttctacaccggt

SEQ ID NO: 395 - DNA, 384 bp, Bos taurus
  Clone ID: 47-BOVMS1-015-Q1-E1-D12
ggttggttcaaataatagaaacagtagtgtatgttaagagcttactccatgctaggcactgtgctgagcacttaaatagataaacctttgaatctgcacagcaattctgtgagaaacaagtagaatctgcacaaagtattgagataggaataaacattacattaggaagaataaatatattatgcctatctgaatcaggattgtgttcaaataaatgattatttaaatcatagtttatattcttggggaaaaaagctatatagaatcagtgagggtgtttttctaacatatgaaaatgctgattactccttgctgtattacacttaatatttgaagctacagtttccagaataagtgaagtaataactgggcagacatttagtt

SEQ ID NO: 396 - DNA, 409 bp, Bos taurus
  unsure (379): Clone ID: 47-BOVMS1-017-Q1-E1-D4
tgattaaataccaaaaatagaatgacaaatgtattttaattgcagatgaggcaattagttttagggcaggtttttctgctgttgattttacttcaagacatacggagagaaaactgtgtcattttcaagacatttccctctacagttttaaactgtagtgagcatatgcttcgtttacttccaaagaggcagaaacagctggaattggcttatagcacatgctttgtttgatgttatgggtgatgacctacactcttattttagcagtcacttaatgttctccagcaaggcagatgtggggttcactaggacttaatgcctgatgtttttcctttgggaaggggtgggagtgaatgtgtcggggatgggagggtagcangagaagaaacgggagaatgagtgagtgtgc

SEQ ID NO: 397 - DNA, 409 bp, Bos taurus
  Clone ID: 47-BOVMS1-020-Q1-E1-D4
ggtttatgctttaaagccatttctgttcagtcttttaaatatttatatttcattggttttgcagaattgcatatgtgcccatttaaaagatttgcatagacttgagagaaaccatacagttgtcccagtcaagtccagtgacatttgattaatcagtgtttgatagaattgaaagagttgagtgataaacagtcttccagcatgtaaatgccattgacttctgacctgacattgagtataataaaaatgagaattactaaccatgtcaaatgctttagtttctggctctcagatttatctagtaactctacagaggaaacattctttgttatatataaagtttttttgaaacctgcagtgctgattattagaaaggatttgtcagacttttgaacatgatagttatatc

SEQ ID NO: 398 - DNA, 144 bp, Bos taurus
  Clone ID: 48-BOVMS1-001-Q1-E1-D8
agtgggacccacccccactgactcccccaccgacacaggcatgagcatgatcacgggtgcccctgactcagcagctcccatcaccatctggcgttctgaaagccccactgggaagtcccagggcaacagggtgatcaagaagat

SEQ ID NO: 399 - DNA, 323 bp, Bos taurus
  Clone ID: 48-BOVMS1-003-Q1-E1-D8
ctgatgtgtggtcacctacagcgtgcggtcctggccggaggaagcacacgtgtcacatctcgaggaaaagaaaacaacagaattctagagaaaatgtgtttattttgatagcaatacatcattcatgtcatttttagtcttcctaaacctgtaaaaggctgtttaaaatttagcgatttgaaggcattatacctaagaaatcacttaaacatttttaaagctactgagatgaatttatttatgcacttcagaggtgctaaattttaaaagctgaaagacaacaaaattctaagaagtatagtcaaaaatgttgcatgggttgc

SEQ ID NO: 400 - DNA, 417 bp, Bos taurus
  Clone ID: 48-BOVMS1-004-Q1-E1-D8
gaaatttcttgcgtacagcataaaataaatgtggttattataacaacatagtgaaaaaaaaacttcaaagtggaggaatcagagcctgtatctgtccattaccaaaaatgtgattgacatttaaggatgaaactctatattcacaaatttgaaatttgctctaacagttttgaccaagtttagtagtttgcatctgacataactaaagttttgagtgttcatcaagataagtaaattgatatattgatagtacccaataacttgctctttgagaatgttttccccatcactatactgagaaatataggtgttttaatctaacttgccatgtaatttaagaataattatgagctctgatctagttaaagttaaccttgatttattttttatttataacaataaatcttgaaaataatt

SEQ ID NO: 401 - DNA, 406 bp, Bos taurus
  Clone ID: 48-BOVMS1-008-Q1-E1-D12
acgcgtccacggacattagcttctgtttaaaatgttggtgtttaaaggctgtaaatgggtgtttacaaagttatctgatagagcctaattggaggaaagtccagagtaaaaatctggtaatttgtgtggagagaaagtagcaggtggaagatggtaactgagatgaagactttaaaagctaggtcataggtatactgtttgaatttagtgtagttttgagtctagtgtgcacaaagtattcttcagatgatatttggaataattataattaaaatggattgagttctatagatattttgataggaaaattagccataaagtcctggacttcttatttgaaaaagttaaattttaagtttactaagttgaacagtatacatacaactcttagaaaaatatatatgtc

SEQ ID NO: 402 - DNA, 453 bp, Bos taurus
  Clone ID: 48-BOVMS1-012-Q1-E1-D6
gtaatactatagttaaaatggctgtaagaatagttttataaaagtgaatacacagatctattgtatttgaaacataactatttgacaattattagtgtgaccaaagtattaggcagttttcatacatttttcaccttgtacaaaattctgaattcatttttcttccaggttgacaaggagttgtaggattgaaatgccctctaagtgttattttggttgttctaacttacaaaagtgattttgaataagaaatatttggtgttctttttataaccagtttttaattggtaactgttttctgtattgtttaaaaacggatcaaaaaatgtaagtctattggtagagattaagtatttattgctacaacttagttgataattgtgttactgtaaagccatacgttctgttaaagtcttgtttgcttgaactgtttatccctacaggtgaaacact

SEQ ID NO: 403 - DNA, 348 bp, Bos taurus
  Clone ID: 48-BOVMS1-014-Q1-E1-D12
ctctactacactaaccagcaacactgatctacaatgattttcttgctgaatacatttcaagtgtctcttcatttatgtatatcttccatctactcatataacagtagaagcaattcactggtcatttaaaaatttcttcagacaacacatgatgcatgagcaatgcctggtttggaaaagatattcacatacatttggtagattgacatatcttaactctacgtctatgacagtttacatctattctatggacgtcaataaattttattatagctgggaaaatactggagttatactacttaatcgccgtagtagcataacttatttcgccatttggcataatatgga

SEQ ID NO: 404 - DNA, 272 bp, Bos taurus
  Clone ID: 48-BOVMS1-014-Q1-E1-D8
atgacgacagacacgatatcatatgaggtccaagttcacactacgtcacatatctgccatattgtcatcgaatatcctctgacagacagtcaatctacaacgaaagaaacatctaaagacaaggatttctggtgttaaattatgatgaaaaatttgagtatggcattcactagctgagtcactggttgacacacagacatctaactatccaatagactctcatacatagattggaaaacatcgcacctgcaatctactcaatgatcacatga

SEQ ID NO: 405 - DNA, 421 bp, Bos taurus
  Clone ID: 48-BOVMS1-017-Q1-E1-D8
cataaattcatatttgaattctgcctccattatacaggccctcccaaaactcaaacactataagccgaatataggtgtagagtccttagttttctttccttttattttcattataaaatacagtttgttcaggatagtactttactaaaaggactctcttcttgggatcccttatcctacagttcaggtcattagaaagattcattttgttgagaaacaacaatctgaatcttgacattttctatccagcttgatggtagagctctgtgactagagtatgtgaccaggttggtacttttatactttgtctatcttgtttttgctttaaagataagacttaaaccaacaacctttacccacccctccaaagtttcactttgaaccttagaactcaatcaactccacttaaaattgttgacac

SEQ ID NO: 406 - DNA, 398 bp, Bos taurus
  Clone ID: 48-BOVMS1-018-Q1-E1-D8
gacacccgctcccatataagcattcaatcagtgtaacttgcaaaatgcataaacatctgacagtttgaatttatagtgttgatggaagaaatcatttttaatgtgtactgtaaaacttgaaatactcaggagctgagtggatatgtttgttgctacttacaatcccgacctgttagtcccagtagttttgttttaacatggtctttctcaactttgtttctgtttaactacagatgacttctgttgtagactcacaagttgaactgttgtattataacagtattacatgtcaacagtgtggttatgacctttatttatataaaaaccaaatatttagtcaatttactgtgtcttaatttaatctttgtacaacttccatttttaagtgcttaaaatga

SEQ ID NO: 407 - DNA, 413 bp, Bos taurus
  Clone ID: 48-BOVMS1-020-Q1-E1-D12
ctgaataattgcaggcagaagacatctgttttagaatttcctaatctattgccactgtcaagtgaagtgtactacactgcaaatgaatatcaaattgaaaacttagaaaatgcttctaaactctcggagttacttggtatatttgaatctgaaaagactgactcaagaaacgtgctgcctatgactctagataaacagactgacggagctactgctggcagtcctgtgcagtctgtctccaggtcaggcctcggtgatgggaaaagttcaatgccctcttctgagacaaacattttaaacatcaaaggaaaccactccaataataaaaacctacatttcttcttttcgaacacggtgaaaattgctgctttttccaaaaggaatgagaacatttttatgcataatttaataga

SEQ ID NO: 408 - DNA, 104 bp, Bos taurus
  Clone ID: 49-BOVMS1-001-Q1-E1-E2
accgacttatttttttgagtttattcttgatttttttttttttcccccggtttctggataaacctcccttctgggaacaagataataaaacatgtaatattttt

SEQ ID NO: 409 - DNA, 384 bp, Bos taurus
  Clone ID: 49-BOVMS1-002-Q1-E1-E2
aaaaattctagcaactgggagcaacacgaagatgtgaagtgactcaacttctgatatcctcaatacatcacatatctggcttgtctaagacgggcagatattcactacatagcttgtacaagcagctttcgttgaagtttagacgataagaacttgtcaccgtgtttcaaaccttccattaatgtgatgcttcacgtctgtatttctcctggagaatattttcaatacttctcgtccagatagcacatgcattttcaagtcatatgtcccagtaattctacaatgttcaacttattgtgaaaaccaacgtttgattttcacgaatttgagtgttttatctgtcttaaaatttatttggtttagtgacagttcacacacttgtgt

SEQ ID NO: 410 - DNA, 121 bp, Bos taurus
  Clone ID: 49-BOVMS1-003-Q1-E1-E10
gcttaataaactcgatttggtctcataatatatatttgtattttatatgacaaaatcatttttaatagacagttaatgagatcacgttgatcaaatgcatgttcttcagttttaaacacac

SEQ ID NO: 411 - DNA, 424 bp, Bos taurus
  unsure (390): Clone ID: 49-BOVMS1-005-Q1-E1-E2
gtttaacttaaaaaaaaaaaaaaaagccaaacttggctagaataggtttcactgcctttttccatcccgctgtttttattgcattcagtaaacagttggaggaaatctcattatcaatgggtacctatcactctcttaaccaagagttggctattatttccttgttgtttcatattctttgcttttcctctgtatataaaaataatgatgaaacatcattattagaggaaaacatccaggtggaatcaaaacttacaaatgaaacttaaaaacagaaaagccctcgagatacaagaggagaattgaggaggtgctgaaactcttggagaagtttggctaattagtatgattctttcagaacccccagttgaattcactaagcctcttganggacagacggtcgaagatgaagccacagcggtat

SEQ ID NO: 412 - DNA, 193 bp, Bos taurus
  Clone ID: 49-BOVMS1-007-Q1-E1-E10
ttaggttcactgcttcattgaatctagttatattattaatatggactgataaaaatgagttcattatatattacctagctagtatttacatgaaaaacaagtactggggtagtagtgtattccttgtttgcaacaaccaaccaacgaaaaggacaaaccgttaacaaatgaatgttacaaatacttggttcca

SEQ ID NO: 413 - DNA, 65 bp, Bos taurus
  Clone ID: 49-BOVMS1-011-Q1-E1-E10
gactcattctgtatagcagtctttagcactatcaggaaaatcaactgctagggcttaaatacaac

SEQ ID NO: 414 - DNA, 166 bp, Bos taurus
  unsure (36): Clone ID: 49-BOVMS1-018-Q1-E1-E2
tttaaggtttaaaattttgcaactgcaaattttaanttgggtgataaagcaacaaatctcctactccctcgttgacaattgagagaaaaagactgaatggtgaaagggagtttccctgtactgtaaagctaagggttggataaatgctgggtttgtaaccaaatga

SEQ ID NO: 415 - DNA, 415 bp, Bos taurus
  Clone ID: 49-BOVMS1-020-Q1-E1-E2
tgaagactgatatattcataacatgtattaatcaagagagaaattcagatgagtgtaaggatacagttcttaaagctgaaggcttaggttgcttaatagtttattttatatagattaaaaactttgaattttctgtttttatttttaactgataggcatttagtgaatgtcactaaaatgcattctcactccctcccaaaaagaattacagttaaatacacttttcctctagattattaaatatatccatgctaatgttatttttatggtgaaccacacataatacttataaacaaaacaatttaatgcagttattttcctacaggaaaaagaaaaataatacagaaaagtaagaaggtcagaaaggtagcatattaaccttggttcataagcatctgcccattattttttaaag

SEQ ID NO: 416 - DNA, 239 bp, Bos taurus
  Clone ID: 49-BOVMS1-021-Q1-E1-E2
tatgatcgtggggtaatgaccctgcatggactcagttctggagggcattcagttggatgttgctgtgacgtggaccccacgctcgcgaaagtctacagtaacgcaggtcccatcatcgatcacggcagcaccttgagtatgaccatgtatgtacccgaagatttccttgtatctgcacgagaatgtctgctggcacagtctctatccacattatgtggactgacactatgtgacaggag

SEQ ID NO: 417 - DNA, 70 bp, Bos taurus
  Clone ID: 50-BOVMS1-003-Q1-E1-E6
ggagaatttctaatgtgaaaatgtattccatgaaggtaattttttaaaaaaataaaatgctgcataatag

SEQ ID NO: 418 - DNA, 240 bp, Bos taurus
  Clone ID: 50-BOVMS1-004-Q1-E1-E10
cacgcgtccgaccaagcgtccgctgtaacactgtaagatactgatctttacaactgtttaatcagttttatttttgtacagtattagtgacctaagttattttgctgtcccatttttgtaaatcaaggtgaaattataagaggattctgacagtaggtattttgtacatatgtatataagttgtccaaataaaaataataaatgataaagaaaaaaatagtttaacaacataagaacagg

SEQ ID NO: 419 - DNA, 232 bp, Bos taurus
  Clone ID: 50-BOVMS1-004-Q1-E1-E6
cataaggtggctctgaaagatatgatcttacaccttctttgatggggaatcttaagtctacaattttcacatctagtgtcaattcactggatgtcgatttacaggatcgtgcatgagaaaggggagacgttcaagtgcctaaacgtcttgctgcacaccatgcgttgcacttctggcttgatatgaccattgcccgcacagctagttctgccaaatttattggcggtttttg

SEQ ID NO: 420 - DNA, 401 bp, Bos taurus
  Clone ID: 50-BOVMS1-007-Q1-E1-E6
ccggtcgaccacgcgtccgaatattggttgtctgggagtatatttagtgcccaatgccccaatcctatgtgccgggcgcagccaataaggctattaactacaataagcctatggcattgtcccttccttcaccaagatgcttagctaaacctggcagttgtacgatgttccacatctcatttttttcgccataaacataattacccacgtcaaaagatgcattttcagaattacaactacgtatgcagtctgaattttgtcaatgcatgtcatttatcttaaatccatacttatggaaattgtatcgttcacctgaagaatgctggtagaaagttattatgaaacaccgatatttacgaaaacagaggggtaaggtgtaagtctcctgttacactgatttc

SEQ ID NO: 421 - DNA, 404 bp, Bos taurus
  unsure (350): Clone ID: 50-BOVMS1-008-Q1-E1-E10
acaaatttttaaattcactgcttcattgaatctatttatattattaatatggactgataaaaatgagttcattatatattacgtagctagtatttacatgaaaaacaagtactgaaatagtactgtattccttgtttgcaacagccagccaacgaagaggacaaaccgttagcaaatgaatgtaacaattacttgtttccaagatatttaagcacataaacaaatacaggaacaggctccattctcttcctaacaaaaagcatcttcagcgtgtgtgatttaaaagaaaggagattctgatttcctagaaaatgatattttggcctgtgttgattcttattatgaatgtntgtttacatgatgtacagtatatattcagaaagtatttttgcttcagcatttac

SEQ ID NO: 422 - DNA, 418 bp, Bos taurus
  Clone ID: 50-BOVMS1-008-Q1-E1-E6
attatggatattagtgttcctcatgaagatatacttgtatatgcaattttaatggccttcagatttgtaagattgtatgttgtatataccattctattaagaaatatgtacacctacctgtccactgtgcttcccaacatagataaagcatgataaaaattattatttaaaatatacttgtatttatacctcagatattcttttggattttgtacctcaagtctttttggtttgttttttgttttttgctaatgtaaatacactttacatgaatacagtctaagtgaaaaacaagtaaataaaagaagaggtttataacttgctctatatctgtacagaatataatcaataagtgcactattaaatgtttaaagtaacggaaatgtccggcctgcttttccattgtaatgcatctctc

SEQ ID NO: 423 - DNA, 375 bp, Bos taurus
  Clone ID: 50-BOVMS1-010-Q1-E1-E6
gcgatttgccgcttctccttctctaacctagaggacactggcttcgtcaatggggagttggggggatgatttgagggtggaagcctcacaggttgggacctcttgtcaccttgacccacccccccaccccaaccagtgggccttggcttctccagccacccccagtgctgcgtggtttgattctcagttgtaccttcggttctttctcactcgcattataaacgttataattttattctaaaaaactgtaattttttttttggcattttggaagtgattgctgctgtttaaatatattttaaaaataaatgacaaataagcagaaaaaaaaaaaaaaaaaaaaaaaataaaataaaaaaaaaaaaaattaatatt

SEQ ID NO: 424 - DNA, 210 bp, Bos taurus
  Clone ID: 50-BOVMS1-013-Q1-E1-E6
gggtcatcagcacactgtcaatatcacgacaatatgatcgtaccgaccatcgaactccgggaagagttcagcatccagtcaaatgacaagttccgctgattttttttttttaaactaataaatcgctttcgataacacttgatcacttcgctcactttgcgggcaacagtcaccttttttactacagtgtacctgagatcttgccattta

SEQ ID NO: 425 - DNA, 136 bp, Bos taurus
  Clone ID: 50-BOVMS1-014-Q1-E1-E6
ctcaagccgccttgtgatccatgatgactcatgttgacattgcattcatcctcaatcatttccactgctactgtcacaaatcagctagtttcaggggatgacaacttcaaaactctcaacggtgaaatccatgaca

SEQ ID NO: 426 - DNA, 447 bp, Bos taurus
  Clone ID: 50-BOVMS1-016-Q1-E1-E6
cttgcccagatcactgggactgaacatctgaaagagtctgaagctgataatacaaagaaagcaaaggaaaagataccccttcacgtctttagtcccaaatacacaaaattacgtgactggcaccatgaagtttcagcacgtgctcttaacgtacagtgatttctgaggcttgccccccctcccccagcaggcagcacataccttttcattcacttgttctttttctccaacttcttagccaaatctgtattaaatttgccttatgaaagaaaaaatagaacctttctatacttttctaaccatttcctgctatttcgaaaacgaggaggatgaacatgttttgtgctatttggtagcccacaaatgttaaaccaagagagaacagtaaggagctagactgattcaatggatttacatgtgtgtttattgtttttatgggagtaacct

SEQ ID NO: 427 - DNA, 59 bp, Bos taurus
  Clone ID: 50-BOVMS1-018-Q1-E1-E6
aaaaaaaaaaaaaaaaaaaaaaaaaaaaaaaaaaaagggcggacgcacaaaaggataaa

SEQ ID NO: 428 - DNA, 386 bp, Bos taurus
  Clone ID: 51-BOVMS1-005-Q1-E1-E12
gggtcgaccacgcgtccggatcaaaatcgcgagcggccgcccttttttttttttttttgttcactaaaacatttttattctgtacaatatatatatgtgtatttaaatatatatatgtatgtatgtgtgtgtacatatgagtatatacacgcagagaaacctcaaccaaatccctgagtccatgggaacccaggacactaacaaagggaaaggagggaatccatgccctaaggagtaggaaatatggcaacatctttccctttcctccaggttccctgcaacagagggaaagggatgctcactgcaaactacgaagacacgagaggacttacacggggccaaaggggaggtgagggtgtgggacggggagctgtggtcggggaaag

SEQ ID NO: 429 - DNA, 426 bp, Bos taurus
  unsure (71),(91),(400): unsure at all n locations; Clone ID: 51-BOVMS1-007-Q1-E1-E12
aacaattagaatttcttgtttctcatgcagtgccttttgcaaggtttttgctttcctgatccttatttcanaagagtcacgtgaaacatcnccctaagaaatcaacctcacttcttctcttgctatgggtttgggtatcagatcattttacaggattcctctgctaatgtaggaatggcatatttaacaatatttttgtattgttcctgaaaggaattgttttgtctgtggtgagggggagacaggagggaaggtgatgtaacttttaagccagtcatgactgaaattttcaaaaatgaatgatcatcctacacaagtcctcagtcatcaactgaatcccaaatggaaattaaaagtgcagttgtgttaatactcacttatactaccctttagtcatggngggaaacctcacataatagaaccaac

SEQ ID NO: 430 - DNA, 432 bp, Bos taurus
  unsure (250): Clone ID: 51-BOVMS1-010-Q1-E1-E4
aggcaatgcattttcaaatcctaagtcccaataaatccaaaatggtcaaattaatgggaaaaccaaaggttggttttcaaggaatttaatggtttaaccggtttaaaaattaattgggttagtgaaagttcaaaaacttgtgtaactgcagtttcccttttggaatgtggaatattaacaagtaatgtcataagtgatgaaaggatttggtgaagggaccagagagaagcaaaagggcacctgcagtgtntctttgaatgctcagcactgaggcgatggcggcggcaagccaaagagtctgcacatgagcagacgaagcatggctgcatctccgcagagccgccagacacactgagcaagtgacaaagacatcgagggttctccaggcgctccttacagtacagatggggtcatgcttgactgcctgctgtc

SEQ ID NO: 431 - DNA, 147 bp, Bos taurus
  Clone ID: 51-BOVMS1-013-Q1-E1-E12
ttcccaaacaatcacatgaatgattctcggaagacattctcctgattggcaaaacaaggtgatggcagatcatcataacccaacatcagaatgatctttcgggatctggcataaaatccaacaagtgcacaggtcacgaaggtgctg

SEQ ID NO: 432 - DNA, 380 bp, Bos taurus
  Clone ID: 51-BOVMS1-015-Q1-E1-E12
acttgcgccatgtttctttagctgaaaacaagaccgtttcaaaatgccttgtagaatactccatttcctttctcatttcctccccctgcacacacacattttttttaatttggaaaatttttaagttgctttgaggtagaacttcctggtcttaatgtaggacacaactgtatcagtatttggagttttcccctttctagatgcttacatcatttttaatacaaaagtgttacatttatctagatatatatatgctaagacctttatttgtgacagcatctgttgcttcattatttacagaagtatgcataagatgataggttgtgataagaaaaattcaaatttcatgactttttaaccagaattgtctaaaaattttt

SEQ ID NO: 433 - DNA, 426 bp, Bos taurus
  Clone ID: 51-BOVMS1-019-Q1-E1-E12
caaccaacccgtcggaatttttcagttttttgtgttaactcatgaactgtttatttaagtaataatgcagatccaagcttcatccagtgatgaaaatatcagtatgatacaagattttgctgagtgtgcttaaaatgcataatggctttatcttctttagtatttcatatattttgcatgacatgtacactcctaattatgcattctgtggtttccaaatcttaactgaagacattcaatgttaacctaagaaagagctttctctgcctgtttttaacctcgcccagtgtttttaatatattatgggaacatcaatgctatttctcaatttctggatgaagcaaagctctgcaggatagcacaacctgactgtagaactagacagaatggatgttaagaatatttagaatatccaaatatatcaga

SEQ ID NO: 434 - DNA, 428 bp, Bos taurus
  Clone ID: 51-BOVMS1-020-Q1-E1-E4
gcgaaatctcaaaggtgagcttcatcatagtcatttattgaagcagtttttctacatttcacagctagtgtgtattctgagggactcttagttaccaaaacccaaaatcaacaacagaaacattttaaaggtagcaggaaaaggaggtgatttttagtatggttccctcagtgtttccaagtttggcatagtgttgggttaatgttgtagctacttccagttaacatcatggatgtcctacaacaccgaacacaagttttaatagttcatggtgaggagtacactttggatctacagttcttgtctcctcattcttgacatttatttaacatttataaacattaactttttgcaactgagtgatttatgtctgcagtgtgttttgttaggaatctagcttttataatgttaacttttcaacctaagta

SEQ ID NO: 435 - DNA, 89 bp, Bos taurus
  Clone ID: 51-BOVMS1-021-Q1-E1-E12
aaaaagaaaactgttctggagttggtgaatattgtgttaattttgctgtttgcttatagttgaataaaaataaaaacactgtgtagatg

SEQ ID NO: 436 - DNA, 435 bp, Bos taurus
  unsure (381): Clone ID: 51-BOVMS1-021-Q1-E1-E4
ctccttgccagatgttatatatatattagcttatttcaaagacttctttaaagtgaactggatgggcaagagggataattattcttagaggttgattcccatcttccctccccaattacttaagaaactcagtgagtacatctccaattgcccatgaaagcataagtttgttttcctcagctgaggcaagcggtagagtacattataaaggaggaacgaaaaaaaggtgagtaggcttcagataaaggcacatgtgtgaccattgttttccttttggaaatcatgtgattgagagattactgactctgggttactgaagggttactgactctgggggctgactgtgaagcacaaggaaccccatgtatgtggaggccgtanggtgagaacacacagttattagcatcatttctgagtgacctcacggattttttt

SEQ ID NO: 437 - DNA, 465 bp, Bos taurus
  Clone ID: 52-BOVMS1-004-Q1-E1-E8
ccacgcgtccgaatgaaaacaaattatcaactagtttccctggcacaaatttttaaattcactgcttcattgaatctatttatattattaatatggactgataaaaatgagttcattatatattacgtagctagtatttacatgaaaaacaagtactgaaatagtactgtattccttgtttgcaacagccagccaacgaagaggacaaaccgttagcaaatgaatgtaacaattacttgtttccaagatatttaagcacataaacaaatacaggaacaggctccattctcttcctaacaaaaagcatcttcagcgtgtgtgatttaaaagaaaggagattctgatttcctagaaaatgatattttggcctgtgttgattcttattatgaatgtttgtttacatgatgtacagtatatattcagaaagtatttttgcttcagcatttactttctatgatgtagtgc

SEQ ID NO: 438 - DNA, 447 bp, Bos taurus
  Clone ID: 52-BOVMS1-006-Q1-E1-E12
gttctagatcgcgagcggccgcccttttttttttttttttgttcaataaaacatttttattctgtacaatatatatatgtgtatttaaatatatatatgtatgtatgtgtgtgtacatatatatatatacacgcagagaaacctcaaccacatccctgagtccatgggaacccaggacactaacaaagggaaaggagggaatccatgccctaaggagtacgaaatatggcaacatctttccctttcctccaggttccctgcaacagagggaaagggatgctcactgcatactagcagagcaagagaggacttacaccgggccagaggggacgtgacggtgtaggacggtgacctgtggtcagcgaatgtataccattctgcctgttccactcctaaaaacccaagatcactgccggggcaaggacaactcaatccggaaggcttcct

SEQ ID NO: 439 - DNA, 92 bp, Bos taurus
  Clone ID: 52-BOVMS1-006-Q1-E1-E8
cgtccgaatcacttcacgatggtgtagccccatctatcattttctctagcgatagatgacctactctcatgtgttttcaggcttcatatctt

SEQ ID NO: 440 - DNA, 416 bp, Bos taurus
  Clone ID: 52-BOVMS1-010-Q1-E1-E8
tgcaattgaaacagtaaattgaagttttattctacaaaattatgtcatgggaagttggtgctctaaggtgggatgcgggatggtagatagtattctcccttttccctagtctatcattgaaatagatttctataagtcagaacttagtatatttgtttgctgtatatatatacttttaaggtggaaatcagagtgaagttgtaaccactggataatatacttatttgtttggtaaatttgctgccctctactgttcaaaacgttttttaaacaaatgttttctcttaagagaaggttctgtctccccttaacaaaaataaagtatcgtacatgaaaacagagattataaaatcaagaattaacaatattattaaaggtgtagcatgagaaacagcgagattttgaaaagttaaaga

SEQ ID NO: 441 - DNA, 452 bp, Bos taurus
  unsure (397),(402): unsure at all n locations; Clone ID: 52-BOVMS1-012-Q1-E1-E6
ctgctcgagtggcacttaggaaactctacgggttcactgagaatcgccagccctgggactactctaggcccaaagagcctgtgagagcagagaagaccattgccgccagctagccagccagagatgtgcagcctgaaacttgtgagcaaaacagcgagactaacaaacgtcaaaagatgatccaagctggacgttttttaaattgtaaagaaatatgtcttattcctcatactgagttcctaagattgaacaaatgtttatcaggtcacttcttttattttctttttagtcatttttgttctgtcaaaaatcttttgatcttttggtattttcctgataaattttaactcaaattcttcatcttattattgtatttaaattgtacagttaggtgtantttantcccttctgactttgaagtatcataatttgtaagttttacatgaagtttg

SEQ ID NO: 442 - DNA, 97 bp, Bos taurus
  Clone ID: 52-BOVMS1-013-Q1-E1-E8
gaggtatattttctttgatactgttacatgttgaatatagtttatgcttagccttgttgctatatgaatgtgtaaataaactttgcaatgaggcacg

SEQ ID NO: 443 - DNA, 399 bp, Bos taurus
  Clone ID: 52-BOVMS1-014-Q1-E1-E12
gctattttagtttatctccttatattatagtacttaacatgaactctgatgagaagtgagctgctgcagcagcttaaacatacaatggctctgccacagtaaggaaaaccaatatcctgagattaggttaatttattgaactgttaatacttagggctccctgttttggagggttaaacttgagaaatagcttataattggctgacttgtacaaaattaatactgagcattagctgatcaggcagaattagtaactagtttcttatgtgacataacttcatgacaacatgtcaacggtacaaaatttccaaaatcacctatttttagaagttactgtaacggtatccctcatgcaactttaaatcttgctgttctcttttgttcctgatgtcagatgac

SEQ ID NO: 444 - DNA, 98 bp, Bos taurus
  Clone ID: 52-BOVMS1-016-Q1-E1-E8
tggatcgggatccatggtccttatcatctctgtgatcctgactcatagtatacctaagtaatagaggctcattggaaacgtcataactctatagcaga

SEQ ID NO: 445 - DNA, 412 bp, Bos taurus
  Clone ID: 52-BOVMS1-021-Q1-E1-E8
ctcttttgttcatcctccatccatggcccttgctcactgtagtctcatccacagacacaatccaggaaggccaaactgtttgttcctcattggtgtaattaaaaggaccatcaccacatttcacatttatgtttctagagcttgtttagaaaacatctcctgaccatatatagatagtggtatttggaggcggggtgcggtgactgcttcccaaagtccaaaaaaaatggaaattttgaattgaaagctaaggataaggaatttgagtcagtgaagatcgggttaaggaagtgagaagactcaatgaaaagtgagaagactctgtgaaaagtatcacgaagagattgatcaacagcagaaatggaaaacccaagaggaaggataaaggaggagatttaacaatagcaataag

SEQ ID NO: 446 - DNA, 430 bp, Bos taurus
  Clone ID: 53-BOVMS1-001-Q1-E1-F2
aagaaatttcctcagcaactggagatagtttggccatttggttatttgggcaacctgttgtaaaattgaaatttacacatcatttcattaaaaattgtgccttacaaaatgcaaagctgttgcacatagtgatgaattatggatgcagtacattgaagagagatgaagtcacttccaagttctcaagacttctcatggaggtgttggctgctttacagggggaaaaagttttaaaaatcaaaagaaaatgaagaattgacaacattttgaaaatgtacagattaagtccaatattttgattaaccacctgcatgttttattaagtattttgataatatggatgtctgcactttgcatgatattagaagagtactttaccaccaataatgcacaaaacatgtacaatagaatcattcataaccgattttta

SEQ ID NO: 447 - DNA, 186 bp, Bos taurus
  Clone ID: 53-BOVMS1-002-Q1-E1-F2
agaattaatgactgaacaacaacaaatcccagccaggagcccttcaaagttgactttgagttcattgggggaagaagttggtgcagaaatgtgagttccctgttgctccctcttactgcatttttagaggggggactgctgccggaacttctcccaggggcaagtaaaaggatattttctttcttt

SEQ ID NO: 448 - DNA, 103 bp, Bos taurus
  Clone ID: 53-BOVMS1-007-Q1-E1-F10
atctcttatagtgtttacatacgttatcattgttattgaagctatgtttatacagattatgtagacttaagcttctactcctacataattccatcatcggggt

SEQ ID NO: 449 - DNA, 84 bp, Bos taurus
  Clone ID: 53-BOVMS1-008-Q1-E1-F2
cccgtccgctcaaggacctgcgaataaagcgagcaggctcccctccatgttgttctggtgaggctattcatagttattactctg

SEQ ID NO: 450 - DNA, 356 bp, Bos taurus
  unsure (52): Clone ID: 53-BOVMS1-011-Q1-E1-F10
cggcggaatccgggcaccagcgtcgggaaacaaccttacagtgatacatgcntctgaattttaaaatttaagtttaatttttaaaggcttttaaagtgaattatcatacaaaatgatagctcagttatgatcccaatgttagtagtagttacttgattaacaggtgtatatattaatcgatttgctgaatgagttgtcagttgtcctatgtaagtatgaaggcaacaattttggaaacggtttaagaccatctggaccttaagaaaaatattctgtattttataaagtttttcacatttagagatgagcttcagaaaagtttcatcctttgtgaagcagacgagttgggatgagct

SEQ ID NO: 451 - DNA, 434 bp, Bos taurus
  Clone ID: 53-BOVMS1-012-Q1-E1-F2
gtcagagtcatcctagttgccaccgagctgccagtccgccttgtcagcagaggctgagctggatcacagatcacccacgatgcactgtgacaagacttttggcacaacatccatccgctctcgctgtgggtctcacgtggggtggttgctctgctctatgggcagggccttctccttggtgctaggatcagaacagacgcttgcagttattgtagtatcagcatgcagggttctggtgggaaaggtagttatgagttctgattctctgaaccgtggggaaaagaataaaagagttccactgacaagaatgaccacatgtaacaaaaaaaagggcggccgctcgcgatcaacagaatagtactcagccttaaaaggaacaaaacagtgccatttgcagagatgtagatacacctagagactgtcacacagaatga

SEQ ID NO: 452 - DNA, 54 bp, Bos taurus
  Clone ID: 53-BOVMS1-015-Q1-E1-F10
aaaaaaaaaaaaaaaaaagaaaaaaaaaaataaaaaaaaaaaaaaaaaaaaaaa

SEQ ID NO: 453 - DNA, 137 bp, Bos taurus
  Clone ID: 54-BOVMS1-001-Q1-E1-F6
atcaagctgttgtcgctctaaaggatatatgcttaggttggcatgtctgttaactgatacatcctcaatagtgtcacctaaattcagttcacagtgcgtcgatatacggagtcttgactgtcgaagaatttggcgtt

SEQ ID NO: 454 - DNA, 429 bp, Bos taurus
  Clone ID: 54-BOVMS1-004-Q1-E1-F6
ccggtcgaccacgcgtccgattaaccgtcacggggagagcgtctgtacgccgagcgagtcgaagatgaatgccagaggacttggatctcagctaaaggacagtattccagttactgagctgtcagcatgtggaccttttgaaagtcatgatcttcttcgaaaaggtttctcttgtgtgaaaaatgaacttctgcccagtcatccgcttgaattatcagaaaaaaatttccagctcaaccaacacacgatgaacttcaccacactgagaaacatccagtgtctttttgcaccactaacactgcatatggcattcaatgcagtgcagcatgttcagcgtcttccatttcatccaagctcaaacctttcactggatactttgacgggtaacgatgagactattggctttgccgataatcctaatgacccatc

SEQ ID NO: 455 - DNA, 67 bp, Bos taurus
  Clone ID: 54-BOVMS1-005-Q1-E1-F6
aaaaaaaaaaaaataaaaaaataaaaaaaaaaaacaaaaaaaaaaaaaaaaaaaaaaaaaaaaaaaa

SEQ ID NO: 456 - DNA, 342 bp, Bos taurus
  Clone ID: 54-BOVMS1-006-Q1-E1-F6
cgcgtccggaataatcaacatagaattttactaaatacttcttgggaacctctcttttgtgacaatatagtaagtaatgtatcatttaaaatacaatgttgaccccatgcagaaaaaagtaatagaatagtaaaattgttacctagacgtatttttctaacacctagttcttcaaaccttcaagttgaggagattaagttccttatatactattttccatttgtattctacagttagaggttttgctttgctttgttaaaaagtcatttaaggaaattttgttcttgaaacaaattttgtataagaacaattaattaattttgagttgagacatccaaattg

SEQ ID NO: 457 - DNA, 391 bp, Bos taurus
  Clone ID: 54-BOVMS1-007-Q1-E1-F6
acgcgtccgaggacactgagcagctgattaacactacatatgaacggccacatcaaactgcgtgagccatttcgtcacttggtctaagatagtgtcacttagtcattagttaatagtgctcaggggtgaatgcaataacaatgtcatggtctagccatgacatttctgtctatgtcactaactatgaatgcacgctaacagtctgagttacgtactgttcagaatgtctcgatcgaaattttctttggggataggaaatttgtcactgtacatatatatcaaataatggtcaggtcgtttttctataagattcactaataattttttcttaatgtcatactggaacctttttataagatacctctactccacttttcagactcacattttg

SEQ ID NO: 458 - DNA, 398 bp, Bos taurus
  unsure (334): Clone ID: 54-BOVMS1-012-Q1-E1-F10
ctttcaagaactgtttgatttttttgttcttggcagggtgggggtggggcgttaccagttaatttgttttgaaatatttaggcattctttgagttataaaattgtgatgcagggatatttggaaattcacacatgaaaggtgacttcactagttacccgcttaagcagaatagtgtgtatatgtacataacatgtaagtaatcctcactccattgtgcagtgccttttagatgttctgctttctataaagtcttcaaatttttgcatatatatattatatatatatgatgtaatgttatagaaatatatgtataatatacatattttttccagnggtatctgatagctctgtattttgttatggaagttgaaaaaaaaaaaaaaaagggcggccgctc

SEQ ID NO: 459 - DNA, 243 bp, Bos taurus
  Clone ID: 54-BOVMS1-014-Q1-E1-F6
ctcacggcagagagccacacacccatcgtccgatcagatcattggtgcatgtctatacctggatctcatgtcagcttgggaggtgtgtgttcaaacaccaagatttatagtggaggtggtatggtcacccatcgatgagtagctgtgtatagcagcatctacgaatttgattggaagagacgactctcgagtctataaggtacggcctgacattgccctaagttcagcatgataactcttcta

SEQ ID NO: 460 - DNA, 405 bp, Bos taurus
  Clone ID: 54-BOVMS1-017-Q1-E1-F10
attttccccacctactttcatggaggctttaagttttccatttttatcattacaagtggaaataagtactttaattgccttatttcatagttgtcatttaattttgtactaaactggtacactaattgtagtttagaatagttttatattgtccatgctagagaactgagaatttgggtaaattttatatataaaagacagtaattctgtaaattagcaaattcaatattttgaccagttccataaattgttaaagtattccaaaatgttaatgattaaaactgaatatttctagataagtagaaaataattgcttgtacaagtctaagctcagtcctgtaacccagttatcagatcttgatcaaattttgtcttccacctagagaagtttctaactgtaacagt

SEQ ID NO: 461 - DNA, 71 bp, Bos taurus
  Clone ID: 54-BOVMS1-017-Q1-E1-F6
tgaacaaatatatttatatgatatgtataactattctaataaaatgtgttcttatcatgaggtgtgactag

SEQ ID NO: 462 - DNA, 226 bp, Bos taurus
  Clone ID: 54-BOVMS1-019-Q1-E1-F6
aaagaataaaaggaaacattgcaagtaaataaataaaaaaaaaaaaaaagggaagaataacaaaaagctagggaggccaaacaacggtgttaagtaccatacttaccgctccaaggctggcctctcactcttcgaacatgtcccttgatttcgtatcacagggcctcgtttttcactctctcgtctggtccatctctctttgcaccatgttgtgttgtcttctctg

SEQ ID NO: 463 - DNA, 68 bp, Bos taurus
  Clone ID: 55-BOVMS1-001-Q1-E1-F4
acccacgcgtccgacaaaagaaaaacaaaaaagaaaaaaacttaaataaaaatgcaagaaaacgtcaa

SEQ ID NO: 464 - DNA, 119 bp, Bos taurus
  Clone ID: 55-BOVMS1-003-Q1-E1-F4
gtcttaggttccattttgggtaagggatggagaccaaggtaaccccaagggaaaatcaatatccctgggcgaattgcgggaaattggcagggaaggttcttactttcaaatttaagtca

SEQ ID NO: 465 - DNA, 228 bp, Bos taurus
  Clone ID: 55-BOVMS1-013-Q1-E1-F4
tagactcgtgtgggtatcttcgggatgggttaatatgtaaccgagatcatatattctgtgctagcacatcctacttctcacctatttgtggcttaaacacgcaaacattggtgcattataccaccgaaatgcaattgctaggagccggcacaatctatctggaatactttcttacagtccgaagttagtgcctcagcactgagcatgtatttttagaagaccagtttt

SEQ ID NO: 466 - DNA, 358 bp, Bos taurus
  Clone ID: 55-BOVMS1-016-Q1-E1-F4
ggtcgcaattccgggtcgaccacgcttcgttcaagagttggactggttaatggacaaaaaccttgccattcccttgttcgccttctggcaaaaactgctggatttcataatcatcctggaaacacctctggccaaggccatcgatatctgacctcccagcaccagccagcagcaggaccacagactcgcctgtaacttcgcaccttcttcacagagggacctaagcgagctgtgcaagagatgagaggatatgtacactcactgtacaaagaaaagtacaggatttttggaatacataatctactttagagtttatttgctgatttgctttttacacactttcatgtgaaagagtgat

SEQ ID NO: 467 - DNA, 411 bp, Bos taurus
  Clone ID: 56-BOVMS1-002-Q1-E1-F12
cttatttataaaaccactccgctaaacctctctctctccagctataaacacagagatgtcttagctttgggaacaggccaaaagcaccctgatcccattagatgctgaggatccatgacccctttgggccgctttcccactgctccatctccaggtatttttcagtggcccctgagtgccgcatccccacagcagcaagcacaaggcctctccaccacttgggttctggctgagggggagatacaggagcgcactgaatttgtgatttctggtgtcacctgtgttaccaaaaattaaaacaaagtcttgatcagatagcttaatatatttttaatatttggagcatggattgtcacttcctctttccctttttttataaggaaatgttggagagttacaccattgctaatg

SEQ ID NO: 468 - DNA, 351 bp, Bos taurus
  Clone ID: 56-BOVMS1-004-Q1-E1-F8
aaaggctttgttgtgggagcaatgactcttggtatgggctattccctgtatcaagaattctgggggaaacctaaaccttagaagaggagatgctgtcttggtcgtcctggtggtgcttgctttagttagacatctcatattgaggttatatgtttatgttgaaaataaattgtttgggtcagacaagaacatggtaatttgaaaattggcctcctttcttgcaggcttgatttgcctggtgaccaagttactggtgactagttcactagctatgtcattcatgggagtcagaccagcacagaagagacatgtcacttttatatacacttgatagtggtacctgtccacctt

SEQ ID NO: 469 - DNA, 447 bp, Bos taurus
  Clone ID: 56-BOVMS1-006-Q1-E1-F8
ccggtcgaccacgcgtccgtattattttttgaatttttatacaagtctttatttacaacttgtttaacaactgtacactttttgcagccttgaaaacatttttgtacttgaatgggaaaatatagtttgaccaaatcttaactttattcttcatatacatatacatatattatatgcatacatataaacatatacatataattaataccataacaagttggcagtcataaaattaaaatgaataagtgacatcaaaaggaaatacaatataagatttcaaaaaattaaaaatctgtcttctggtgatttcttggacttcatgtttttgtgagtttggtgaaaatttctttctgaagctctccaacaagtcatctacctcagagaaacagtgagaaaactcacgaatctaacagaatcaacgactggcaaactgagaatggacgcccc

SEQ ID NO: 470 - DNA, 358 bp, Bos taurus
  Clone ID: 56-BOVMS1-012-Q1-E1-F12
cgaagtttttcttgaacttaagggagaaaattttaaagaaatctgcagccagctgcttcatttccactttactgtttttcagagtcacttatactaaggaatagaggaatgcttttgtgtttattgacaacatgcttaattttccataaatatgtcagcaagcttttttttaactgcatttatcttccttttttggttttcattattaaactctaaaatataatatcacttattggaagaataatttcttgaaccatgttgtgttttaactgatttttcttatcactatttctcccaaaagaaattatccctaaatgtaatggtaagttttacattcaaatttaattaactttttgac

SEQ ID NO: 471 - DNA, 440 bp, Bos taurus
  Clone ID: 56-BOVMS1-013-Q1-E1-F8
caggaattaagtttgtcagagttagctttttactatttttattcctaacaagtatgttaagaggcattcctacttttttccttttgtggtttaaaaaaagacagtaggtagagtataccactgttgtatatatgctaaaagtgggtgaattctagtggaataatttctaacatccgcagacttgttttgcaatggcaaatatttttagaacaccagttttaaatattgctgttgtatcaaacccaactctgattgttttccaacaaggcatctgaagttgttaaagagcaaaaaggttatccatatagtaagcgtattaattttaatgccactaacagaattcaaaaagacttaattggaagacagatctgtcagggcccattattccaggaggctactcaagtgaaatttttacagaagagactggtaaagattatgca

SEQ ID NO: 472 - DNA, 415 bp, Bos taurus
  Clone ID: 56-BOVMS1-017-Q1-E1-F8
ctaaatttaactgtacattaaaaattatctaaacttaagagttagtttgaagatatgacctaatattaataaacatctctttacttaaagattcatttgcttccttattagatattgtgagtaggtatgcttaaacggaggagcagaaatatacattcagcaaaaacagagagcagtcatttaaaggtggctttcactctgtgtctgccctggactgaattcaaggtgaaattcagcatcagctaggatgtcatgtgaggtgtgtagacatcctgtgctgcatgtcagtctggtgtttaaaggaatgtgtttgttgtaccatgtggactctaaattcaactgtctgttcattttgtctggtgtttaaatcaacgaaaaactgatgtattctatcactggagggaaaatgccaaag

SEQ ID NO: 473 - DNA, 334 bp, Bos taurus
  Clone ID: 56-BOVMS1-018-Q1-E1-F8
cttatttaaacatctaattacttttccaaatagaaacagtcacttagatacaaactagtcaatgagcaacatgaaacaggaaatttttagtactttttagacacttattttattttacttaatgataaatgatttctgtaagaaatgcttaggaagagaataacatttaaagaatagatacattttacaacaacatattattatcactattggatattaggtttcttttgtcattatatttagcagttggccaaccttttcttcctcctgttatctctgaaactcagccagattctcttctttgattcctatgcagagctcattaccagccaag

SEQ ID NO: 474 - DNA, 421 bp, Bos taurus
  Clone ID: 56-BOVMS1-020-Q1-E1-F8
cctgaaaataactttcctggtcatggaacaactggatgtatcctttagcttatgaaataggatttgaacttgaaatctctcttttttaaaaagaacctgattttgcagggcagctacatcatgaatgtatatattaagactttgtagctgaattgcacacgaaatcagattgccaacttcttatctttcaattttagacatcattttatccttaagttgtgagtgatatatgtagcatgctgtgaaatgtctgttatagttctttaattcatcagtattaatacagaattatctttttgcgttccttggtactttttattccatgtaatcagaagctgtgatgttttgcccttgtcgtcctgtgctttgttactgtaatttttttcttttttacgaagcacgtgactttggactaacgtga

SEQ ID NO: 475 - DNA, 197 bp, Bos taurus
  Clone ID: 57-BOVMS1-005-Q1-E1-G10
gtccgtagaaatcaagcagcataaaactaacccgaaatcatcagaaaaaaaaaaaaaataaaaaaaaaaaaaaaaaaacaaaaaaaaaaaataaaataaaaaaaaaatgggaggtgggccgatgcgttagaggtttaattattacttaacagtacatgataagtcttacaacttctaacctgcactaaatttacatg

SEQ ID NO: 476 - DNA, 411 bp, Bos taurus
  unsure (351): Clone ID: 57-BOVMS1-007-Q1-E1-G10
gtccgtgcatttaaacttctgcgaaattgtgtgtgtcatttcgtggcttttcattcctaacctggaatggccaaatatcaaggtgaagttcaaagtttgaaactggatgatgattcagtcatagaaggagtaagtgaccaagtactcgtggcggttgtggtcagtctcgctttgattgctaccctggtatatgcacttttcagaaatgcacatcaaaatattcacccagaaaaccaagagctagtgagggtgcttcgggaacagcttcaaacagaacaggatgcacctgctgccgcccgacagcagttctacactgacatgtactgtccgatctgcttacaccaagcttcnctccccgtggagaacaactgtggacatctcttttgcggtacctgcattgttgcatactgg

SEQ ID NO: 477 - DNA, 387 bp, Bos taurus
  Clone ID: 57-BOVMS1-010-Q1-E1-G2
cgggtcggcccagcgtccgtaagaatgggacctgggatgcacggacaaaagaaaggaatgttgggcaaacaattttgtgggaactcccttcgctgttgtgcaacaaaaacagattcccaattcaattttactcccaatggaataaagtttaacaaaaaatggttaaaacttgggaaaaaaaaaacttctgttttaaaataaacaagtgaatgttggaaattagtctgttaatgttcttaataaagtgttcttggagtttaacctagcagcggatggctttctttagcttagcccagtttccagggaagcattgttttttccaggctgtaaaatggcagaatctcctggatatataatttattctggttggaaaaaaaaaaagcatgc

SEQ ID NO: 478 - DNA, 406 bp, Bos taurus
  Clone ID: 57-BOVMS1-015-Q1-E1-G10
ttttaaatgattcagaaatctaactcagattgacttacaacacatttaccttcgttgcacactttaaaaaaaatctgggagcacccccaaataaacatgggccattgtattaagtaagcaggatacttagggtttatgcatttagccacaagacagtgatcagtgttatcaacattaggacacagtctttatgtgacagaacagctgtgttcctacagtgaaaaggttcgattgtagtgaaaatataacatgtattgactgatgtttcctttctaagtagtgctttatctctattactagtattaagggataagaaatttattgaggacagggatcagctctggtctgtcaacctcagccacctgtttgatgtcacagagaacttggggattgtttggatgtacat

SEQ ID NO: 479 - DNA, 353 bp, Bos taurus
  Clone ID: 57-BOVMS1-016-Q1-E1-G10
ggacagtttaattttgtacagattatgcttacctcaggtttctttagtgtgctttgaatgcctttcttccatataacacgtattactttagcaatgaatacctttccttttcttttctttaagttttaaaaaactggaataattacttctatcttttttttttttttttttgctgtttatatttaggggtttttgttgataaatcaagtcttggttgtggcttgctgaattaaatatttatgagtggtgcatttttaagtatagtaaacaagacaccatattaagtacagtgataaagcatctatattctgtaaaaaaaaaaaaaatctgcctaagcatgttttttaagaaac

SEQ ID NO: 480 - DNA, 391 bp, Bos taurus
  Clone ID: 57-BOVMS1-019-Q1-E1-G10
cagggtccccacttgctagtaagtgtgtttcaagttagcactctcgttccagagttctcatttggtttgttctctagacagtaacatggaaaaacaccactgctcaataggaaccttgaataatttataattttggtcaagtttctcagaaggcctagagaaagacattttttgttttgaatattctcttaagagctcagaatggtgcctgctttggtaaataaacaagcagttacatgggtttcattctttgggacaaaggtagaaagctgcaggatactgaaactaaaagcattgagattcagatacttcttctgccttttggcttgtagctgtagatgatccatgttttatgttgtgtgtgactaaaatatgttattaaaacattttt

SEQ ID NO: 481 - DNA, 432 bp, Bos taurus
  Clone ID: 57-BOVMS1-021-Q1-E1-G10
acataactcatctacttttctgaattaagttgtgtcagagatgaaccatctgctcaaggaatcttcttagtaatcatatagtgatgaagcatataattctgatgttagcagttggatattgctaatgctaattttattgcagtactttaactacagtaattttactgtttattcctctagaaacttactaaaatttgtggttgcattttaccatcgctgccacagttttccacaacattcctaatggttttcaactgctttattgtagtagaaaattcatccagccgttggatttgattttagtataatactgtatttcatggttattttttagttcctgccattattgagttaaaaactaaacaacaaaaacatgggggaagaagattgactttcttaaaaccatccaattaaatattaaatatccccctc

SEQ ID NO: 482 - DNA, 410 bp, Bos taurus
  Clone ID: 57-BOVMS1-022-Q1-E1-G2
ggggaacttagttaccttgaaacacattggtcatttcaaagaaaaagaaggtactttattccagcgagactttacttgatgccagaataataattcagtgcccaaagctgccaattcaaatgtgtattccttagattcgccttggtactgtgtgatggaatcagcaaacttcagccaaagctcctcttcatctgggacaacctcaccttgtccttgttcagtgaatggtttcctgaagtgattcatttaaaacgggtgggcaaactttttccataaagggccagatagtaaatattatagactctggaccaaaaggccacctatagcgcctgtcacagcagctcgacgctgctcttgtaacatgaaagcaaccacagatgacccatggatgagttaagcatggctgtcac

SEQ ID NO: 483 - DNA, 363 bp, Bos taurus
  Clone ID: 58-BOVMS1-002-Q1-E1-G10
gttctagatcgcgagcggccgcccattttgttttttttttttttattttttttttttcttattttcatttttttttgatttttattcaaatgaaccgctatgtacttatcgaagactctcatacgtgatcatgttgtgctgccattgccaaaaaagcaatatgcgcatcctcaatgataataggacggacgtcgaaaacgtagctcccttcatgtaaattctgggaatactaatcccaaaaaattagtactttacacccaacacatttcttaatagccaaattgtcacattggatggcaactaacaagcgcactaggccaagcatgatctagctcaagaccatcacatacattcagagcgcca

SEQ ID NO: 484 - DNA, 425 bp, Bos taurus
  unsure (387): Clone ID: 58-BOVMS1-005-Q1-E1-G6
gatctagatcgcgagcggccgcccttttttttttttttttttcgacttctaaagtcattttattttcacttaatcgacagatcgacagatgcagaaatcgactagatgtcaattacaaaactgaaggcagatctgagctatctctgcccgagtacacagttgatttttcccctcccagagtatacagtatccctttcaaaccatggctatgtatgtcataactatatttagaagtacgcagagaggaaaatactactgcaattcaaggctgtaaatgaaagggaaacacatcagagcctcatggaatggaaagctgaaacgtcagttcgtgttcctcaatcaatatcaaacgtcagatgacactggaaggtgttaattatgaccaanaaaaaaaaaaaaaaatcctgtaacaaattccactgaag

SEQ ID NO: 485 - DNA, 135 bp, Bos taurus
  Clone ID: 58-BOVMS1-012-Q1-E1-G10
gtaataaattgagcttgcgacttctcaccgtcaagagtccatctcttctgtaggcaagttgactgcttagaaatcgtgtgccataaatgttctgctaccgttggcatcaatgctagacagtcatcgctcatcctc

SEQ ID NO: 486 - DNA, 440 bp, Bos taurus
  Clone ID: 58-BOVMS1-016-Q1-E1-G6
cacatgttccttggaagcaggaagagagctataaaaagaatcagacctttctatgaaaccagtgttcggtgccatatgtaagcctggttaattggtgttctaaaaactgtcaaataagacactctgtgaaaggtacacattgtttaactggttaaagagtaaaatgcatcaagccaacagggtcttgagctgtcattgaagcttattatgctggcctgcaccagacgatgtctgcattactcattgctaaaaatgttgtgtagaacaaaactgcactaggattaatttatttacaagaagaaattaaaactctacgtatggttttcacatacagcagctctttggagtaacatgcatctgaattttaagttgcaaaggtatctgaatagttaatttttcatgtgcatattttgttgaatgttttggttcaagaaagaatg

SEQ ID NO: 487 - DNA, 384 bp, Bos taurus
  Clone ID: 58-BOVMS1-018-Q1-E1-G6
gggatgccattgccttctccgggctacagagcagggggttgcaaagactagggcacaactgagcaatgaagcacatacacaaggaaaaccacaggaccttgatgtccccattttataggcgaggaaacctgactacaggagcttgtacttggaaagggcacagctgatccatgacagaactggagacttgaggtcagatcctctcaagtccaaggcagagcttgaaacaatggtgggttctctttgctggagctgggagactcctcctcaagcactggccactcctttcttcctccgggattaactgcatcaaagacatgttagaagtgactgaacgcaggagtgacagatgggtcacgtgtttacaactgggcagaatcagga

SEQ ID NO: 488 - DNA, 361 bp, Bos taurus
  Clone ID: 58-BOVMS1-019-Q1-E1-G6
tgaattttagtacgatccttttttcatgttatcaaatgcttgaggcattattgcttaacttggcaaaatctacacagtgttgctgccaattgtaagttttcctatactaatccttttaataactttaaaactggccttactgggttcaaataggcagtatcccttttaagtgacctttgcaactcaagtgttacttgcttatttgatgctcttttgtattttacatctcatttaaatctttctctccaccaaagcttaaattccatgtcttaattttaactctgaactattccattaatcatgttagttgacattaaagtgtctagaggtacagaggctgacctaaggaaacaaaatggat

SEQ ID NO: 489 - DNA, 59 bp, Bos taurus
  Clone ID: 58-BOVMS1-020-Q1-E1-G6
gtgaactcttgtcgttttgtatgagcaaaattgtctttactaaacagatttaatagttg

SEQ ID NO: 490 - DNA, 422 bp, Bos taurus
  Clone ID: 59-BOVMS1-001-Q1-E1-G12
aatttttgtttaaatgattggattggaaaaaagctctgacttccccacaaatggagcatagttttggaactttccttctcagctcaagaggttcatctgtattgtatttgtgcagtgtaatcattgttatttctgcttggattcctaaaagggaaaaaaaaaaaggctcaatggtgatgatcctcatgagtgagctgtacacctgcattcttgtttgaggctgctgggaaaagcagtttatgtttgtaggatttttaagtcagtaagaatggaaatgattgagctaaaacccactctgtacttacagaatgaagattacagaaaagcatgttatatattgctgccacaatttttcttccaaatgattcaataatttgatgattatttaatatatatagtactatcaagcaattcctggtact

SEQ ID NO: 491 - DNA, 405 bp, Bos taurus
  Clone ID: 59-BOVMS1-009-Q1-E1-G4
ggtcttactcgggtcgaacgacgcgtccgctccacacgccggcggcggtccaagggcttccggttcgcccttcccggagggctcggcccggtccccacctcgccggcgtcttgcgcaagcccggctcccgcggtccaagacaaaaaaatgctcaagagactaacaagaccccagggcctatgctgtgtattacaggatgtggcttttatggaaatcctaggacaaatggaatgtgttctgtttgctacaaagaacatcttcagaggcagcagaatagtggcagaatgagcccaatgggaacagctagtggttccaacagtcctacctcagattctgcatctgtacaaagagcagacgctaatttaaacaactgttaaagtgcctcctgcaacacattctgaaaat

SEQ ID NO: 492 - DNA, 369 bp, Bos taurus
  Clone ID: 59-BOVMS1-012-Q1-E1-G4
cttaaattgtatgattgtctgtaagccttgacgtaatgctgtgcaaagatattcagaagatctcaggactacaacagtttgccttcaagactcaaaggaccttctttgtaactctgttagattaccataaagacatgtggcagagccaggttcttattaaactggcatgagatacaaatgctacaagccagcagaggtcatggttcgctggcaacagtttttaacatcatgacgcctgcccagagcatcacatggcgaattgtgcactcggtgctaactgctcctgaaagaagccttacaactttgcgaaataaaccgttcattctcaacgggaaacagtttttaatatcaggagggctgcccaaagca

SEQ ID NO: 493 - DNA, 379 bp, Bos taurus
  unsure (354): Clone ID: 59-BOVMS1-016-Q1-E1-G12
gcgtccgtaaaaggctcagtgtgggacatatggaagctgtcgtcgagatccgtacattgctaggtgtgaccctgctcacccttgcctgcaccttctccttgggggctgaagcccaggtggctaaagagaagcactgagtccatcctaatagaatccaatgacgtacaatgcgagaagccactagtgtgtgatcagcaagcacctaccgctcacatcgtcccctgcccaccccacgggatacctgcctgctctcctccgcgccatccatcaccaactctctcaacttctggaactccagaacccagaattctggaccttgctcatggagaagtttagcaaggaactcttgtgganggctggctttatttttttgcctgtg

SEQ ID NO: 494 - DNA, 419 bp, Bos taurus
  Clone ID: 59-BOVMS1-017-Q1-E1-G4
accttcatttgggttaactccccatgctgattcttttgttttaaactgaaccacaggtacagtttcctttttgccaaatgtcaaaacaggtacacattttaaaatgtaatgctttttaaatagtaaagtgtataaaattagaagtgcccacatataaaaatacttgagatcaaggttatctttagtgactatcatctgcatatctctgtaagttcaattgtgtttcttacatccctgtcatattaccaacagaggcaataaaagcttcagtgaaattgccatgactaaatcttttcacatattatttcagtgtaatacttttaaagactaaaatataccggaaaacttttctagaaaggataattattaatggaaagagcattgtaatggcaagtttttgggagaaaagacatgccaag

SEQ ID NO: 495 - DNA, 391 bp, Bos taurus
  Clone ID: 59-BOVMS1-018-Q1-E1-G4
ggtggaccaacgcgtccgcttaagcaatgaagtgctcccttttaaaacaagttgcaagcccggcaaaatagggcaaatccttttaatggtgaaaagggaggacatattttccttcaaataattttctttgcattgagtgtgagaaagataaaagtggcttaggaaaagtgaatgaaaccagtacaatcactaactttcatttgtatatattgttgtgcactgtaggtgagtcttactaacgaatttgtttcttcatatagggtgctgctctttgatggaaatgaagatgatagctaatggttttttcttccagtctgctttctataaccaatcagtgtttttttaatgtttgtatattctttgtaaaatttaagtgtgattcagtattgaa

SEQ ID NO: 496 - DNA, 327 bp, Bos taurus
  Clone ID: 59-BOVMS1-021-Q1-E1-G4
ttgtattctaacacagaaaacaaacacatgcacaatcagaaagtaaagaaaaaaaaaaaagtactagacaaaaaaggttcaacaaaaaataaaatgtatgaaatcaaatcataaaaaaattctgtagagaaaattaaaatttctttaaaaaaattttaaatcaggggggggagtcccaaagggtttaaattatcatgatcagtaaaaggagctaaattggctcttaaaaagaggcaaaacttccaattcaagggcgtttatttataaaaccctttaggggaaaaacatggggttaccccttgttaaccccttttgacaaaaacccgt

SEQ ID NO: 497 - DNA, 419 bp, Bos taurus
  Clone ID: 60-BOVMS1-002-Q1-E1-G8
gtttacttgaattttatttctgttgaaagcagattttgactgtttgtcccattgcttaaattacagattttcagttatgtgagatttcccttccatcatctttaaagcagatgcgtataagggcttagtgttaggatatgcgtatttgcagcgctgaagacaaatgacttacaaatatgttttgcttacatgttgttctaggactagcactgctatcaatgcaaagtatttttaactaacctgttgagaaattaaccatatttttgcatttcagccaaaataaagaccatatttaatattctgatacagctaatatgtaaacctgaaatcatgtttcatatgatctggactgtattttccaatttaaatttaaaatgcaatatagaatcagaaagggtcatatttttcaaacgacttca

SEQ ID NO: 498 - DNA, 436 bp, Bos taurus
  Clone ID: 60-BOVMS1-004-Q1-E1-G8
attgacaatcttgttgtgattctcattcacagtattatgtagccatcttttgcaatttcgtgggtttcttttttggaaagttgtgtattgcacttcttggaattttgaagtcattggatgggaataaatccagagaatcttagatcagatgctgacttgtggcggccaaaggagagaaatggggagagtctgcccccccgcccccacctttttttttttttttgcttccttaagagtcagaacacagagacacattctgtaaagcagagccttggccaggaatggtatgatcattacagagaacaggccattgttcgttttgagggtcgaactacaattggtggccgctgtcacacagatgtgttggattttggtccaacctcttcacctgaaaaagccagtggagaaaagttttgttttgtaccacatgcaaacg

SEQ ID NO: 499 - DNA, 421 bp, Bos taurus
  Clone ID: 60-BOVMS1-007-Q1-E1-G8
aaaatcaacaggtgaactatctattgaaggaacttccagcaaggaagccgcacaaatgcctcatctgttaacaccatctccagtaacccccaacactaaaggtgatggagctagcaccgaaagcatcatggagaccaagttgagtactacagaagcaacagtgatgagtcaatcactttcaaatgctgtttccacatcacaaagctccgactccaagactgagactcagagttcaatcaaagcaacagaaacaccagttaacacttcaccaccagaagcatcatctttcagaaccgctacattatcctcaatatcagttacaagtgcagaaaacatctccccgtctcaagtaggccttgagaatgcaaaaaatgcaagtgcttctacaaccagcccctcttattccagtattattttgccc

SEQ ID NO: 500 - DNA, 384 bp, Bos taurus
  Clone ID: 60-BOVMS1-010-Q1-E1-G12
atgagatcatgttgtatatggtttccacatctgtagggtcaggatgttgggcaaaatacttttactgtctgttctgtctatgccttcacgttgagagaagagaaatttagttttaaacctgaataaatgcaactgtttcagttgctcacttgaagaactgaaaagttgatggctttgaaggtttagataaaaaattacagagaatggaattattactgaaatttaggccatttacaaataggtttattggcttgctttttttatgagacattagtattttcatatattgtatagccctgggtttaaaagcttgcaagttgtgattccttggaggttatctaaaccttcaagcactaaacatgcttttacattctttttaaatga

SEQ ID NO: 501 - DNA, 409 bp, Bos taurus
  unsure (382): Clone ID: 60-BOVMS1-012-Q1-E1-G12
gtgtgatttggccgctttatgacagttacttgagaagagtcccaactgtattaattgacgggtaatatagaggttaaattatctttaacacttacatgtttagaaatctttgctttgcctgcctgcttacttggaatgtaagcatgaggggaacgcgctgttgacgtcactgaagccacagccaggtatctaaggccttaacgttcttatgtgatgctaagtgcaccgccttcctatgttcttcctgtaactaatgtacgtaattttgcccattcttgtatttacaagagacagatttaagagttatattctgagtgtgtcgtatgtcaccttaaatgacatttggaaaaaagtatgtatcaaagtcagaaattctcatcanggaaaagtaatattcctaatttttcct

SEQ ID NO: 502 - DNA, 395 bp, Bos taurus
  Clone ID: 61-BOVMS1-001-Q1-E1-H10
ctagttctagatcgcgagcggccgcccttttttttttttttttatttttttttttttcttttttttctgaaaacaagttttatttaaataagggtttaaatacattacataacattaaaactgaagaggggaaaaaaccaaattaccagtttacttcacacggcattgggcatctgttgccagtaagctgcaagctctacagctacgtgactggtaacattggtttgaaatttgttcccttgtcaaaagtttaactgatataaagttggcctcacattctagtttggacatcaattagctaggacatgtctggtcatgaagaccttggtggcaagccagatgtcctatcaccttcctgaaaggtggctgctctaagttctgcccaaccagtcaca

SEQ ID NO: 503 - DNA, 391 bp, Bos taurus
  Clone ID: 61-BOVMS1-002-Q1-E1-H2
aaaaaaaatgttgttttaaaaagtgttttctcctgctgcagtaaatactttgcatgatgaaattccagggtcacactttcaaagtttatcagtgaagtagtgattaatcatgagagtgtcaaagctattgaactttttgtataaaaaaaaaaaaagagaaaactttacaaggtgccaagatgtacagacaattttgttactttttttttccaaagaaaagcgtacctttagggagaacagtccctcgcatcagacagatgcaccgtcaggaatgaggatccaccctattgtccctagtctgtccttgtgagacaagttagcgctgcctgcagtgtaccagcaatgaaaggaaataccaatgcttatggatgggaagagtgaccgccaagcc

SEQ ID NO: 504 - DNA, 280 bp, Bos taurus
  Clone ID: 61-BOVMS1-008-Q1-E1-H2
ggtcgaccgacccgtccgggaaaacaactgctctcagtgcggtgctcaccttgggcacattttcgacaatggacctcttcaaacgggcaaaaaatacggcataaactcggaatcctttgtcctttaacccctgcagagagcagtggcgccaaaggggacagcgcggggggcagcccggcccccggtgacaagacggagctgtagagatgcagccggaggcggcgacagaagaaacaagtgtacttaatgcacagcttattaaagcgaatcccatagcgtt

SEQ ID NO: 505 - DNA, 459 bp, Bos taurus
  Clone ID: 61-BOVMS1-009-Q1-E1-H10
acgcgtccggctgatgagtatataaatttgggaccattaaaattttttttgatgtaatataacctaacgttgtgctggtacctgttttaccatgtgtaatttttgttctacatttcttaatttgtttagagttttatgaaagatggtatagtttttattgacaaaagcaaagtaatcttacaactatgtgcatacaaaaagcaatactattttgtgactaaatattttatattaaaatttacatcagcaattgtcttgagaattcagggaaacagaatggaatttaaaatttcaacagttttgttaaacctagaaacgtgaaattagtattccaaagagattctgaaatttcatatctggggaaaaatgatggtacattaaatcaaaattgaggatgaatgatttaagaataacatactgacttttgaataataaaagtgaagagtaagagaaattgta

SEQ ID NO: 506 - DNA, 249 bp, Bos taurus
  Clone ID: 61-BOVMS1-013-Q1-E1-H2
cgcgggtcgaaccactcgtccgtattatttctaattattcgtatgctgaaggggacacatggttctcttatcgattcagatctcaaaattgggttgcgcctcaagcacagaactggggaatttgtcagacttagatggacggcaacgtccagtcatgacggagactaggtcacggttgattcactagacattttcatagtgaacatccgcaaacaacagttttgaactcattgtctttacatgcagggt

SEQ ID NO: 507 - DNA, 472 bp, Bos taurus
  Clone ID: 61-BOVMS1-014-Q1-E1-H2
ctaaaatccaagcaaaaatccctggattgaagcgtaaagctgaatgagaaagcctgaaagagttaacaatagaggagtttatctttaaaggggatattcatttgattccattggggagggtcagggaagaacacagccttgacattgcagtgcagtttcacagatctttatttttagcaacgcagtgtctgaggaaaaatgacctgtcttgactgccctgtgttcatcatcttaagtattgtaagctgctatgtatggatttaaatcgtaatcatatttgtttttcctgtatgaggcactggtgaataaacaaagatctgagaaagctgtatattacactttgtcgcatgtagtcttgctgtatttggggaattgcaaacaaagtggagctgacagaaataagccttttcacagtttgtgcactgtgtacggtctgtgtaggttgatgcagattttccgaaatgaaatgttt

SEQ ID NO: 508 - DNA, 407 bp, Bos taurus
  Clone ID: 61-BOVMS1-015-Q1-E1-H10
cagaagagcaccaatgttcatctacaaaccacagagtaaaaaagtgtttgagggagaatcagtgaagctagaatgccagatctcggctgtacctccaccaaagcttttctggaaaagaaataatgaaatggtacaattcaacactgatcgaataagtttatatcatgataactctggaagagttactttattgataaaagatgtaaacaagaaagatgctggatggtatactgtgtctgcagttaatgaagctggagtgaccacatgtaacacaagattagatgttacagcccgtccaaaccaaactcttccagctcctaaacagttacgttgtccgacaactttcagcaaatatttagcacttaacgggaaaggtctgaatgtgaaacaagcttttaacccctgaa

SEQ ID NO: 509 - DNA, 424 bp, Bos taurus
  unsure (386): Clone ID: 61-BOVMS1-016-Q1-E1-H2
cggtgctcgactcacgcgtccgagaggaggggacagtcgcactggaagaggttctgtagattgggagatagaactacaacaggaacttcaggaatatgaagtggtggcagaatcagagaaacgagatgaaaactgggataaggaaatagaggaaatgctgaaggaggaaaattaactgtctgtctcctgaaataaaagaataaactgtaacatgctataactgacattaaattctagatgttgagactcgctgaatcagaaggcgcaaaggaatataactttattaaattcaaaattctttgtttttcaagctgaaacttgcctcttctacttaaaaaaacaggacacaagacatttattctaataatcaaaaagggatgttttangtaatgttcctttaatataaatctagttaaagatgttc

SEQ ID NO: 510 - DNA, 429 bp, Bos taurus
  unsure (230): Clone ID: 61-BOVMS1-020-Q1-E1-H2
gtaaccatgagtgtcagccgtaggaatggtggtttcgttttaaggaataagcgtgttggggaggatgacgacagtactactgacagttttacccttccggggcgagtggggttatgtgttgaagcataatcctcgtgctgagcaaactgactgaaatctacaaattacacctatggactgaattatgccaaattgccatcttcctttataagagagaggtttggggatantggtaatggaacaaaaccttaagactacttctgaataatacttgggaactgacgacttggtgactggtgaggagcatcagagttgggtatttcaatgtgccaagtttgggtgaaccgggtttgcctctttcatcacagtgtaaacacaattgtgtagttgactaaatcctgggtggatgtgagcgggactgattactgt

SEQ ID NO: 511 - DNA, 430 bp, Bos taurus
  Clone ID: 61-BOVMS1-022-Q1-E1-H2
acgcctgcaagtaccggtcaaatctcgggtcgacccaagcctccgggccgtttttttcccccctgatgctgaagaaaaaaaaaaaatgtttgcacggattgcttaattaaaaattgcaaacaaaatctcatttgaagttagcattttggtcattgttgtctttgcttggtcactgtactttccaaaaaaatgcaagctatagaataatcagaaacagttattttagcttaacataatagactctgaaatctttttttcccttagagtaaatatatatatatatatatacacacacacacacacacaataaacagcaatgtaaccttaaaacccatctttctctggatctaagaaatttttctaagcaaagaagagttgtttatttcccacaaccctacttaactccagtggatctgtgcccttttcccca

SEQ ID NO: 512 - DNA, 425 bp, Bos taurus
  Clone ID: 62-BOVMS1-001-Q1-E1-H6
atttcagggaatgagtaaattagatgtataattaatttgccaattttctgagaagttgggaatgaaagattttcaagacttctttctacctagttaaaatgtgattttatgatatcattctaatattacaaaggaatctgtcaaccgtgttccacgtgtatgcccttgtagactcactcgcatttctccatacatttccagcactttagctttcactttaaacctttcgtcatgcttgatatcacgaatgctatggagtctgttccgatactgtcgaaactggtggacctcctctgccttttgcattgcctgttgctgagttagctcatctgtttgcagcagaggctcaatatttgtttttcttgatataacagaatcatgtgaatacataagtcatttgggaactctggaatgaccttcagcac

SEQ ID NO: 513 - DNA, 425 bp, Bos taurus
  Clone ID: 62-BOVMS1-002-Q1-E1-H6
atttaccttcagatcctatggtgttttacagcttttaccacagctgcatcagcttacagttattatcattatggccggaaaactgtccaggtgataaaaggcagatgaaaagtcatcattatcgtcaacaaggaagcagcacacatcaacaatggcagggccagtgggagtctacaggagttcccttattttggttcagcttgaaggaggacttgtcagaacaaaccatgtcatcaaaattttaagtaatgtgcattgacaataagcttgatcatgggcatatgcagaatttccaacatatttttaaatacaaataaaactataatttaggattttttatcttaggtttcttaatttataagtagcaattattctgattattgtcagtctttttttttaagccatttaaaaggatacattcaaaa

SEQ ID NO: 514 - DNA, 403 bp, Bos taurus
  Clone ID: 62-BOVMS1-003-Q1-E1-H6
cacgactccatatttatctgtcgcaaagaaaatgcatgtggaaaatccatccatccctctcttccctcccttctgagcttctgagcactgtttttttttgttctgaaatttataaccaatataatgctgaagatttgccatactgttatttgccatactgttatagaaacattgaacggtaggactcctagaaaatttgcaaagagacattattcaccatatcagactctcaggttctagtgatgaaaactttgcttatactttgctgttacttatacctgctgctgtacggaaaataaaagtttattcatgccacatttaactttgaccataaataaaagggagcatctttttggagttagtcatggtcatatttagtggtatttctcaacagttcttaatt

SEQ ID NO: 515 - DNA, 402 bp, Bos taurus
  Clone ID: 62-BOVMS1-006-Q1-E1-H10
cgcgtccggaccatataagttgtagaaaacattttaatggaaatcaaactcagaaacctacatgcagaacatcctgtatcaaatcccgcttttccatgtatacaccacatttttgctaaaaaatactgacagtacttttgacataaaaatatttcttatgtatgcactgtattataaaagcaaacaatgcctactactttgacattttgtagaagctacttttaaatcagaatatttagttttcaatatataatcaatacaaggtgcacttacttttttaacggggtatggttctctgagttctttagtaattttgtggttttttttagatacctccctactatatactgaatttgtagccttttaaattggtgcacctacgcaaatgtaaatggcaatttt

SEQ ID NO: 516 - DNA, 88 bp, Bos taurus
  Clone ID: 62-BOVMS1-014-Q1-E1-H10
aaaaaatcaaagcatcaaggaatgactcccctttcgaagagaaaaaataatgataaagccatccctgaaacttaatacctatatcaag

SEQ ID NO: 517 - DNA, 347 bp, Bos taurus
  unsure (331): Clone ID: 62-BOVMS1-016-Q1-E1-H6
caaatcctgtttaaaggaattttaaagagatgcattttactatatcaaagaacctacacgtatttgcctaaacattctatatacctttgtaatgataaaacctccccccttgacggtgaagcttattcctattaagcctagactgtgttcttttttttttttcctggtctgatgatgaatttgtgaactcttatctttggtatatcttttattaaactgcactgtttgtttagtcaaggtaaataagtcattatgtatttgaataacttggcgtgtcttgagtgttgtgatatgagaagcattgtggtccttctacactaatgaagtgcanataaaattttgtattt

SEQ ID NO: 518 - DNA, 263 bp, Bos taurus
  Clone ID: 62-BOVMS1-018-Q1-E1-H6
atcacatacaaactgtccacgcaataaaagcttcacttctgttccaaaacgataatgcattatgttaacaaaaaagataaaaaaaaataaatgcaagaaaataaaaatgatataagggggggggaaggttaaattgtaaattatagacgttgaaataatatggggtggattcttttaggtttcattcttttgttgccgtttttggggttttaaatttttttattggtgttcccaatttttttgttcttgggcggtgtttttaa

SEQ ID NO: 519 - DNA, 114 bp, Bos taurus
  Clone ID: 62-BOVMS1-019-Q1-E1-H6
tccgggtcgacgcacacgtctgttcgacatctctagatgatgcaacatttacttatcgcttttcatgcaatactcataagttctgtcaatattagtcacactaagttcaattca

SEQ ID NO: 520 - DNA, 404 bp, Bos taurus
  Clone ID: 62-BOVMS1-020-Q1-E1-H10
taattttgttctctcttcagaaatgttaaaaatatacacattggatactagtaaagcttgaaagaagttttcaagttgtaactttttgcaaggtgcagtccataatatcttgtataggctctcaaaactgctgaaaattttagcctgaagcacgactgtaatgtcgaccacgtggaaccagggcctcgtctgtaagcccatacagtaagaaagttgcacatcttattccaaacaagtattggtttgtctggtatctttagagccttactctgttgaagtgattgtcagctaaacattatgtctgttgtaactttgataagtatttccacttttgttatttattagtggtatctttttttgaagtgtcagatgtgactatttaaaataaaaggtcattataattt

SEQ ID NO: 521 - DNA, 82 bp, Bos taurus
  Clone ID: 62-BOVMS1-020-Q1-E1-H6
aaaaaatataaaacataaaaaaaaaaaaaaacaaaaaaaagaaaaaaaaaaattaaagaagaaaaaaaacagtactactgaa

SEQ ID NO: 522 - DNA, 438 bp, Bos taurus
  Clone ID: 62-BOVMS1-021-Q1-E1-H6
cgaaattgtacagtgaccaacatgtggccaagtcaagaagctccttagggaagacccatcgcctgaatttggaaagagacttcatcagatgtcataagaaactctcctagatgtcaacataaccaaccctatgaatataaagactaaaattcatgagtagaacaggaaagcgatcctgactcatgtgttgtgttctttatttttaattttaaaagaggctcttgtatagtagtttttgtctattttaacattgtagtcatttgtactttgatatcagtattttcttaacctttgtgactgtttcaatattacccagtgaaagcttttcttaatgtaactttgagtacattttaattgccttctatttctaaaacctaaagtcattagttgggctttactgttcttgctattgtttggcatacatatctgcctggaaat

SEQ ID NO: 523 - DNA, 255 bp, Bos taurus
  Clone ID: 62-BOVMS1-023-Q1-E1-H6
aaaaaaaaatacataaaaaaaaaaaaatgaaaaaaaaaggacaaaaaatcataaatgtaaaagagctatcaattacacttcaatgggaggtagttttcccactactcaatgttatgatatgggaaatcaaatatagcactccacaatacgattgtataagtgtatcaggtatttttaatgcagttgggggacttatgaattaaactttttgtttgcatctccacttgctttttttttaaaaagttctggtcatca

SEQ ID NO: 524 - DNA, 437 bp, Bos taurus
  Clone ID: 63-BOVMS1-001-Q1-E1-H4
ggtcgaggcacgcgtccaggcagaataatgtgtagaatgaaaatgcaaaataagtttttttggcttttcttcctgtttaaaaattgagagattgatttggatagttctatttcttatcatggttttgtatagcaatctacttctcctgttattctgtgtatctgattatagttcatcttcagaatacagtgtcagtagaaataagataacacaggatgaattcttcacccaaattctacatactccatttatatcgttagtatgcctcatggctccgccattttaggctaaatttactgtggctatatcctgatttcgttgaagataatggcaactgtgacatgcagaataatagttaacgcaaagatttcaatgtcgtaattcccagaacctgtggatatgtattgttacattacaaaatgactttgctgatatga

SEQ ID NO: 525 - DNA, 447 bp, Bos taurus
  unsure (9): Clone ID: 63-BOVMS1-004-Q1-E1-H4
gaactatanaaatactttcaaaagctgtgttaaaggaatgacatatcacaagtgctagagcatctttaaaaggaagaaaagatagaatattagttgactgggtgatgaatgatgttaaatttgaataatgatagtttctgtattctaaacttgatgagaaaaaggtaccaagtctattgtaaaacctgctgtcattgaggaagctctgaacaaccctggtttcacaaataacactttgaaagaatttgaccaataatgtaagtttggcttgtgctttagttttgtaaggcatacttttttgcttcaatttctgtgtccaggagagtttggatgtttaatggttcttgagctaattttataatatatttaatatattaacagttgagatatataaaatttgtacatattgaattaaaaaccagttgctaaaataggtgtaatagactg

SEQ ID NO: 526 - DNA, 400 bp, Bos taurus
  Clone ID: 63-BOVMS1-009-Q1-E1-H12
gcgtcggacttgtctctgttgaacttagtgtcctgttcattttaatgtaatatgactgatggagatgagatgtcctctacttggaacaaatgtgctcctttttcttgcaatctttaaaaatacatccatctaaaagccattagctggacccctcacaggacttctaagcagagatttaaacttttaagtgaacctatctgctagaaggaaattgggaagaatttaatgatcagggtaatctattattgttttctacatgtggaaactttctgtcttggatattttatcttttttttttttttttatctcagtgttcacatttttctggaagaaaccactgtgcacagtacaaattttaagtctgaatatttcaaagaattgtgaacatgagaagttttaa

SEQ ID NO: 527 - DNA, 146 bp, Bos taurus
  Clone ID: 63-BOVMS1-009-Q1-E1-H4
tcggcttaacaaaagagaccagaagagcaccaatgttcatctacaaaccacagagtaaaaaagtgtctgagggagaatcaattgagctagaaaggcaaatttccggtgtaactccaacaaagcctttccgggaaagaaattatgga

SEQ ID NO: 528 - DNA, 333 bp, Bos taurus
  Clone ID: 63-BOVMS1-011-Q1-E1-H12
gcggcgcgcgggccggggcaatgacggcaatgcccggggaatgtgccccatggagaaccaccccgggtcctcacccgagctcatttaaaagaattgggttgcccgaggtgcccaaagtagaagaaatatggagtttagagcccgagaattttgaaaaattaaagcagttcatgggtttgattttcctttcaagtggcaacaagagaagaacagcaagctctgtggttcaagactccagactggacacaatcttttttgccaagcaagtaattaataatgcttgtgctactcaagcatagtaagtgtgttaatgaactgcacgcatcaagatgt

SEQ ID NO: 529 - DNA, 369 bp, Bos taurus
  Clone ID: 63-BOVMS1-013-Q1-E1-H12
ctgaaacacgatggctaccccaggccggaaacctctacagctgttgacaaaaaggacaaacctcttcgaagacttaatatccattcagggttctggattttggcatccattgttgttacctactatgttgacttcgttcaaactgttaaagacgacttccacaccagtagttggtttctcttctgcagtgccttgttgctcgttactgtgtcgattgcattttactgtaacgtctaactggagtgggatcatggaattgaagattatgatatcaagtatccagcattgatacttattataaacgctacttttattgtagcaagaatttgcttcaatgatgcttatgtgcacgtatggtcatttttcact

SEQ ID NO: 530 - DNA, 468 bp, Bos taurus
  Clone ID: 63-BOVMS1-013-Q1-E1-H4
aaagaatgtgtactgatgttcttgcattaaagctttacagagatttaaactaattatttttgtagttacttctaccaaatagcctttccttttcaataacattccttagtattttttatagctaagtacattgtattttcgtgctgatgaactggaattggaaaaatagtacaagtggatgagttggaaattatgcactttgaaaacattcactttgtttactccaagtttagcaggtttggatttgatgaaatgctgagcctttctatagctttctaagctgagaagtagactgtggcccagtgatgaaatgaaagaatttatttttctctcgtgtttacaaaaatacttagcttaaatatttacactggttgaatgtgatttaaattggacattttcatcaatgcaatttaatgtgtagataaagagctatttcaaccattataagtggattggcagtataatttt

SEQ ID NO: 531 - DNA, 75 bp, Bos taurus
  Clone ID: 63-BOVMS1-021-Q1-E1-H12
gcagaatataaatttgtgtattattactttaacatgcccacgttttcctttaaatattaaaagaaggggttctgc

SEQ ID NO: 532 - DNA, 365 bp, Bos taurus
  Clone ID: 64-BOVMS1-001-Q1-E1-H8
gggccgacgcacgcgtccaaaatcatagacacatcccctcacttcctgtgatcttgggcagcatggctgctgccatgtttcagagacacatatccgcctttgtactccgccttaagtaagttgatacccaaaacccttgctaaggtaacctatgaacagtttttgcacgcatgtgttttggtggattgcagctactacaatcacatatgtcgtagattacttcagtcatattctacataccccattatgatcataaatatccatctttgggtcttcactttatgtcaaaatccttacttcacagtcacaataccttttctacacaatgtgtccatgatacatttgacgaaattataacgcacatt

SEQ ID NO: 533 - DNA, 64 bp, Bos taurus
  Clone ID: 64-BOVMS1-002-Q1-E1-H12
acaagagctcctgagcctctggcctcccctccccagagcaataaagctgtcagccaccgcctcc

SEQ ID NO: 534 - DNA, 172 bp, Bos taurus
  Clone ID: 64-BOVMS1-003-Q1-E1-H8
cgcgtccggactacactgaatttatgagtcatctaccttcagtgtacgtaagagtgtctgcatggtgtagtagcggtcactcctatgactcgacagcctattcacttccgcagagtacttctcggaactgaatttacatattctctatgttggcagctccgccctctgtttg

SEQ ID NO: 535 - DNA, 425 bp, Bos taurus
  Clone ID: 64-BOVMS1-005-Q1-E1-H8
aaaaaaatgtctcttaaaggcttcctgtggactgcctttattttcctaagctcaagacaccagttaacctcaacataaatttggcctttattagaatttctgtgcattatattgaaagctaggtttacatcacctcaccccattattccttttagttacataaataaattcaccataccaagaaaccagaatggggcaatttggttggcctttaaggcaacaggtttgactagctagctatacttattgtcacatctaatgctaggtatcagaaaccacttgagccggaagtgtgaactgataattccagagacattgtcaacgtacttcatacttttttaaaaatgttttttatggatgttttacatttgtgtgattgccttaagtattaaattagtggcaaagatcatcattaaaaatttttt

SEQ ID NO: 536 - DNA, 404 bp, Bos taurus
  Clone ID: 64-BOVMS1-006-Q1-E1-H12
ctttgataatttaaaatggtatttacctcttatatctctagtcttcagttacaccaaggttctcaaatgttgacccagatcactaatgattcatgcctacttgacttttctggaatcctataaacctttatgaggatatttcttcattttgaggaaatacctaattttgaggcattcacttttgtaaaccgcaaaagtgccttacaatcatgtgtatttcaagagcattttaaattgttgcccagtgccatattgtctactgtgtactatatattatatgtgtgtggtatctattgaaatgattcttatagttcaaaatgttagaaaacagaaatataaatggaaatgttgtagaatatgaggaatgttttaatacagaaccaccaattaagtgagacattttc

SEQ ID NO: 537 - DNA, 370 bp, Bos taurus
  Clone ID: 64-BOVMS1-007-Q1-E1-H8
aaaaatgggacgtcgaatttcatgcgaattcttataagatatatcattgtggccattttacattagctgtttgtatttcccttaaatcactatactgttcaattcgaattttatagacatgaaattatacttggcttccattgactcacattgatatggacaagatgttcaagatggaaccattcaggcatcagactcagacttttcctaaataaggtacaataatgcctcacgtcagaaatatctttaaaaattgtgtatctggatgtaatgaattggatacctgcagatagctctctgtgaatatatgtacctagagagtgaagcttaattatcacctatgatatactcatcaatcttgaatccgcat

SEQ ID NO: 538 - DNA, 363 bp, Bos taurus
  Clone ID: 64-BOVMS1-013-Q1-E1-H8
aaagaatgtgtactgatgttcttgcattaaagctttacagagatttaaactaattatttttgtagttacttctaccaaatagcctttccttttcaataacattccttagtattttttatagctaagtacattgtattttcttgctgatgaactggaattggaaaaatagtacaagtggatgagttggaaattatgcactttgaaaacattcactttgtttactccaagtttagcaggtttggatttgatgaaatgctgagcccttccatagctttctaagctgagaagtagactgtggcccactgatgaaatgaaagaattatttttcccccttggtttaaaaaatacttaacttaaatagtt

SEQ ID NO: 539 - DNA, 137 bp, Bos taurus
  Clone ID: 64-BOVMS1-014-Q1-E1-H8
atgaacggcgatcggtttgtttgcacagcgaatgtgtgtggcatgatcagattttcgtcatttgggggaaattggacctgtcacatcggatcaagaacatccgtcaacatgcacacctcgacgatcatgcgggtatg

SEQ ID NO: 540 - DNA, 402 bp, Bos taurus
  unsure (339): Clone ID: 64-BOVMS1-017-Q1-E1-H12
ccaatggtggggaaacacagtttcttgataagatactaccagacgtaaatcttgggaaaattataaaatctgttcctggaaaactaatgaaagagaaaggtcaacatttggaacctttcatcatgaatttcattaattcttgtgaatctccaaagcctaaaccgagtaaaccagaactgaccattctcagccctacctcagagaataataagaagctttttaatgatctgtataagaataatgcaaaccgtgctgagaatacagaaagaaggcaaaatcagaattattttatggaaatgatgactgtagaaggagtctatgattacctgatgtatgtangacaggtggttttccaagttcctgactggcttcatcatctcttaatgggaactcgaatcctct

SEQ ID NO: 541 - DNA, 430 bp, Bos taurus
  Clone ID: 64-BOVMS1-017-Q1-E1-H8
gcacaacgcacgacagaagaagacccttaggagacaggcaacttgctgacacagacgctagcagggcatgaacgagcagacattatgccactcccctcttttggttcttcctatttggcatttttcatttgattttagagccaaattagttatgaaagctttctttggagaaaacacctttattcccccatgatgttttcatgccctgagaatcagaaaaggacaatagaacagggaaagatttacagtcatcggaagatttgtgttttgcaaatggtgttaagtgatattgctagattggtaatatttttttcagcctaaaattctattgaaatctgtgatcaaaatgttttaaactatccaaaaagaaaatttgtatatttgggaaaaatggatttttacatagcttttgtatgcagatattaaattg

SEQ ID NO: 542 - DNA, 175 bp, Bos taurus
  Clone ID: 64-BOVMS1-018-Q1-E1-H8
gtaaaaagctgctgtggctctaataatcaagtgcagagtttcagaaagggtatggagtgccagtgtggaagatgtaacaaggaatgggatttgtctgataaagtttatgtggcttaagtttggatctcttgtaagactagaatcttgaaagtgaataaagagacaataatgcacg

SEQ ID NO: 543 - DNA, 407 bp, Bos taurus
  Clone ID: 64-BOVMS1-020-Q1-E1-H12
taaggatgaagtctgttgtacttggtattgagtgcgtgcttagtctctcagttgtgtccaacttaagcaccattaattatataaactttgctttagatttgtatctgtctactaaattgtcaatctaaaggatgatatacattagttgttatagaatagaatttagaatatgtcggagtttgtcttggatcacatataaaatgaattattttctagagtactgagatgaatataaggcagtgtcacccacattgaagaaaaagtctttatagacttaaagagtaattaggttaattcattaaaatacccctctagatgtaactagcgttgtatttcttaacattttaaaatctagaatttcaaaaacagaattttagtgctatcacagtttgaaagaggacatccat

SEQ ID NO: 544 - DNA, 293 bp, Bos taurus
  Clone ID: 64-BOVMS1-022-Q1-E1-H8
gaaaatcatacaactttccatttaatgagtcgtagtgtacagagcagaaagccaaatttgtaacagcagagaattacagcaaaatgagttgaaaaattaagactcagccatgtttgcctcagttcttttagtatatgagaatagatacttagcactattatgccaaaagctatttgcccttcttaattttggaagctttcttcccaactcaattatcagtatccagtagtgattaagctggactccggagccagagtacctggtttcaaatccagcccacactccagctgtgt

SEQ ID NO: 545 - DNA, 281 bp, Bos taurus
  Clone ID: 64-BOVMS1-023-Q1-E1-H8
acgcgaccgcaaacgcgtgggaaaaaaataaaaaaaaaaaaaaaaaaaaaaagaaacaaaaaaaaaaaaagaaaaaggcaataaattaacaagaaagggggtaatttcaccaatacataatagatttgggaacaaaattcatcccaatcgttaataatgtgtacgtatttttaatgcaattgggggatctaggaagtagtctttgtgtttgcatctccatctgcttttgttttaactgcttctgctcatcattagttatgtctctttgcttacgtcatttt

SEQ ID NO: 546 - DNA, 350 bp, Bos taurus
  Clone ID: LIB188-007-E1-D3.M13F
accagatattacccgtcgcgccgcgcttcacccattgcaccactacaacaacgcttactacgccacttactacactccttacaatcgcattgcgcttatcctcgttattatgcatcatgctagtcgttgccgctgcaaaccacaatatcaagccacacactatgctacatgccctgaacaatggcaagtcgcaccatggtaccggctgtgcttgtcagcctattaccaacttgcgcatccacctgtacactgcttattgcctccgccttttcaagtatctgcgccgcgtgtccactcagaccctactatatcgcaaataccgctgctgttattactacctgtgcgggccc

SEQ ID NO: 547 - DNA, 446 bp, Bos taurus
  unsure (99): Clone ID: LIB188-007-E1-D3.M13R
atatgatacaagatgtaactgcgctcgttaatctcggcccactgtgtttagagccgtcattgctacctccttctatgacgcagatctacttgcccctancatatctcgagctattgacgctttgtctgcaatttgcatcctgatcaccgcctactctacagccctgtacacgggcccaatgccctatgcccgggcgccatccaccaccctgggcatagtgagcaccatggtttccagtgtaatgtccgctgtgccccactgcaccacaccaaagcccgttttgattcccgctttaataagaatttctttagtttgcaatctgattgtgtgttacagcttatccgagttatccaccgttcccttagtaggcttgccagccacaacaattttggtcgctgccccctaaattgcaatccgcctaactcctggcgcttgattttgagcag

SEQ ID NO: 548 - DNA, 532 bp, Bos taurus
  Clone ID: LIB188-007-E1-D3
agctgtttccttcttagccttctcccagatattacccgtcgcgccgcgcttcgcccattgcaccactacaacaacgcttactacgccacttactacactccttacaatcgcattgcgcttatcctcgttattatgcatcatgctagtcgttgccgctgcaaaccacaatatcaagccacacactatgctacatgccctgaacaatggcaagtcgcaccatggtaccggctgtgcttgtcagcctattaccaacttgcgcatccacctgtacactgcttattgcctccgccttttcaagtatctgcgccgcgtgtccactcagaccctactatatcgcaaataccgctgctgttattactacctgtgcgggcccaaaaagccaaaaaatgctttccataacggggcgggcggtaaagtgcaaattaaaaattggtgcggtaagcataatatgcacgcgtgccttaaatggccacctacattaatcgagcaacaagagggccccatacacgagcgtatccttaggcctaattgc

SEQ ID NO: 549 - DNA, 313 bp, Bos taurus
  Clone ID: LIB188-019-E1-B10.M13F
tgtcacactaaacaaaactgcccgtgtattttatactattacccgtgttgcactatttgcgccttagtacccacttcatacctgcccctaccaactgctttgcgaattatcccttcctcacccaccctaaattgggttgtgcgcgaatgtacatagcccacaaagcctgcttcttattataactgagctaggtgatgtccgcgggttacgcactggcagcgtggctggccaaacgccagcgcgtgcgtgcgttgcaccagctcgcgtgagtgcgttgccaaatggattactacaagttgtaggttgggctgat

SEQ ID NO: 550 - DNA, 594 bp, Bos taurus
  unsure (66): Clone ID: LIB188-019-E1-B10.M13R
atatgagacaagatgtaactgcgctcgttaatctcggcccactgtgtttagagccgtcattgctanctccttctatgacgcagattcgcttggccggggcatatgtgttgccgtcgtagatcttatttatgccggctttggccgcctagaccccattgctgccgtatccaagtgcgcccgccgcctgttcgccaccaacgtatacagtgtagaagacctaaccagtttgggtgttggccgcaatgccttgccaaggttgcctttgcacagccccctgtttatagtgcgtggccaacaccttacacgcgactgttgtttaaaacgccccagatttagtattactggaggcctgccactttttacttgtactagcgactgtatactcgaagtactcggatgcaagtgcgtacaatggctagtggttgccttgtcaaataccccctgcgccgcgttcatgcgtgcctcttacctgttcgcaaacgtagaccgtaaaacctgcagcaacgttaccgcgtaacagagtgccctcagcgtagacttgtgcctaagactaaatgggttgctaacgatacccaccgccgcatggcaatgccc

SEQ ID NO: 551 - DNA, 710 bp, Bos taurus
  unsure (694): Clone ID: LIB188-019-E1-B10
ttcatcgtctagctgtttccttcttagccttctcccagataaaatgtttctcgtgggctcactactgctacagtgtatgcgtagttcgcggttgtcgcactaaacaaaactgcccgtgtattttatactattacccgtgttgcactatttgcgccttagtacccacttcatacctgcccctaccaactgctttgcgaattatcccttcctcacccaccctaaattgggttgtgcgcgaatgtacatagcccacaaagcctgcttcttattataactgagctaggtgatgtccgcgggttacgcactggcagcgtggctggccaaacgccagcgcgtgcgtgcgttgcaccagctcgcgtgagtgcgttgccaaatggattactacaagttgtaggttgggctgatacagcgatccttccagtagtaaccatcgccgctgctacgccccacacagctttattgtgcgccttgatagtgctgttaattacagtagccctgccccacacaaacttaggcacagttctgttcgccacatcccttattgccagccccgtggtagctataaatcactttacacctgtaacggttgcgcgcactccaatcataaccgagggggtcttgtccgttctgttccccctactacttaacgggatggtagcattggcaattcgaatgctagtagcaatgccgcatnccctttgccctgccct

SEQ ID NO: 552 - DNA, 357 bp, Bos taurus
  Clone ID: LIB188-019-E1-B3.M13F
actctatccgccactcctaattcctcagagtatccgtaccagcacgcttaacatccgacgatgctgccgccctaaacaaccgcgatatccgccaagcagtaataccaaagcggagcaaagcctggtggattgctccgcgcgctacgatgctgatgcccgcgtttgttaaagatagagcgtatcccatgcgcacacctcatactaaacacagcttggcacacgtgcaagctactgagctaggcccccgcatggccgctgcttatatggcacctgtgatgctggctatactgggtgcccccgagacacaaatggcccacagactacacatgatccggacaccctatcccaccattcata

SEQ ID NO: 553 - DNA, 432 bp, Bos taurus
  Clone ID: LIB188-019-E1-B3.M13R
atatgtgacaagatgtaactgcgctcgttaatctcggcccactgtgtttagagccgtcattgctacctccttctatgacgcagatgtatgcacgcggattattcgcaaatgcggcaatccataccatcctatcctgccctaaccccacttagcctggccggggatggtagttaggcaaccaacgcatacatcagccatagaatgaaacacacgcattaaccccattagtatgatagccatgcacagctagtcgctacgcatggtatatagttgcacgttggttcgttccagagctaagcgtagaagccaaaacgatgggaataagctcagttacacaaaagaatatacgctagataaactatatgctggatcgacccagacggtgaatctatgtactagccacatccttaaagcgtgcctcgccgtattgca

SEQ ID NO: 554 - DNA, 513 bp, Bos taurus
  Clone ID: LIB188-019-E1-B3
agctgtttccttcttagccttctcccagattaacactattccgccacttttaattggtaagagtatccgtattagcatgcttaacatctgacgttgctgcagccctatacaaccgcgttatcctccgagcagtaataccaaagcggagcaaagcctggtgtattgctcctcggtttacgatgctgatgcccgcgtttgtttttgatagagcgtattccattgttacacttatttctaaacacagcttggcacaggtgtaagctacttagcttggcccctgcatggccgctgcttatatggtatctgtgatgctggctataatgggtgcccctgagatacaaatggcgcacttaatagacatgatcgtgaaaccctattccgccattcatacttgccgtgcctagcccctacgccacacgccgctattcgtaccgcattattttacatagggccttggagattgctgcctgcatggacaatgagcttgataggactacgcgctgggcgagctat

SEQ ID NO: 555 - DNA, 352 bp, Bos taurus
  Clone ID: LIB188-019-E1-F9.M13F
ttaaccatgttgccgaattcgtgttgcacctgatattatacttttcaaacgtgatttgtgcacggtggctgctccccataacgttactgttattcgcatttgccctgcttgccgcgttactgatagctttcacttccgcattcgcattgccaatgtcccgctttgcaacactcctcgctatattggtttcctgcgttggtacgttgttccctgtgatgtgtgtactactagccgcattcgctttcctactactgtaccatacattggtattgctaatcgactttatttccttactactattaaccgccataacctgcggcagtttacagctaaaataattgcgcatgcggcc

SEQ ID NO: 556 - DNA, 281 bp, Bos taurus
  unsure (69): Clone ID: LIB188-019-E1-F9.M13R
cgcatatgagacaagatgtaactgcgctcgttaatctcggcccactgtgtttagagccgtcattgctanctccttctatgacgcagatgttgccggtgcctatgttagtgtatgatccactgtatgtactgcccttgtaagctgctggagcacatttgccagtgctgctaatggtctaatagaatcccatgtgcctgtggctaatcgctgtggtaatttcccgggtagctggaatggccatgccaatggaagtggtaattttgccaggcgcttgtggaacc

SEQ ID NO: 557 - DNA, 696 bp, Bos taurus
  unsure (53): Clone ID: LIB188-019-E1-F9
tttcatcgtctagctgtttccttcttagccttctcccagatcgtcagattgcnccttaaccatgttgccgaattcgtgttgtacttgttattatacttttcaaacgtgatttgtgcacggtggctgctccccataacgttactgttattcgcatttgccctgcttgccgcgttactgatagctttcacttccgcattcgcattgccaatgtcccgctttgcaacactcctcgctatattggtttcctgcgttggtacgttgttccctgtgatgtgtgtactactagccgcattcgctttcctactactgtaccatacattggtattgctaatcgactttatttccttactactattaaccgccataacctgcggcagtttacagctaaaataattgcgcatgcggctttattcttgcactgtttgccaccatttgtgcgtggtagtggtttattcaaatttaaccatatttgtataagtgtcccaatctttcaccgtatcgcgcgccgccgccatcgcccttatcagcattttcaccgcaacggtgttgccggtcgccatcatcgccaccgaaatatacttatcatcaacttcacacaccactacggtaatactattgattctcgccgtactctttgctctaggtactattaccatgccatgccaccaaaccacggtaacgctaaccgttataatc

SEQ ID NO: 558 - DNA, 280 bp, Bos taurus
  Clone ID: LIB188-020-A10.T7
ctgtttcttcccgccttctcccagataccatatccacatgttagagctgataatactggcatagggagcttgattcacagcaatacccgtgaccaagtcaccggcgcaagctgaaactcagtgccatatatacagtgaaactgtggctgagtagcatataggttcattcaagctattaactcaatcgctataggtggattcacgcgcgatgcttggccattagcgtgctaacgtaaggtgaagttggtgagatcgcttccagagtgatggtagaattgcg

SEQ ID NO: 559 - DNA, 380 bp, Bos taurus
  Clone ID: LIB188-020-E1-A10.M13R
tctatgacgcagattacaacatccgatgtagcagatgccccgccgccattgttagaatactcaacaatagtgtagtacgctgcaatatgggtagaattgaatgagttaaagcctttactgtaggagccgttgtgcgtgacaacagcagaaatagcctttagctatattgtgacagcattatccttagtacgtgagagaagtgaagtaaagtcttcaagagtagtggagccagtagcagatgcaataccattactagtgctaagatagttatagaagagtttgctcatagcctccttgcaagtaggtcattgacagtttaaggtgtttgagacccatgaagaggataaggaatgcatctaggcaggataatcgtgggatgc

SEQ ID NO: 560 - DNA, 200 bp, Bos taurus
  Clone ID: LIB188-020-E1-A10
gctgtttcttcttagccttctcccagatgcctatcaccaggttacagctgctattacggtatgggagcatgtataacagcagtagccgtcaccgcggcaccggcgcagcctgcagccttcgccgtagatgcactgagcctgtggctgagtagcgtagaggttaaatccagcattttacgcactgcctttaggtggataca

SEQ ID NO: 561 - DNA, 392 bp, Bos taurus
  Clone ID: LIB188-021-E1-C5.M13F
tgtttccttcttagccttctcccagatacgttactgccgctgccccgcctcctccttataccttttgttctagaaaggaacgtttgctacttatactgcgccctaacctagatggcgccccccacaaacttcgtaactactagttggcagctttactgaaaccagccaggaaccctataacctgtacaaccaaaaacttacaacaaaaacaaaaaccgggcgctccaaaaccccgaaacctttttttacgtggccgtttaccccaaaacaacttacggccgttaaggggcgcccgggccaaaacccaagcgaggaagaactataacccccaccttattcgtccctatttttccaacacataccttaccttttaatttgcctacaacccacgc

SEQ ID NO: 562 - DNA, 467 bp, Bos taurus
  Clone ID: LIB188-021-E1-C5.M13R
aatctcggcccactgtgtttagagccgtcattgctagctccttctatgacgcagatggtgtcctcattaatgctagcaccctaacaagcgcaggcctggatacagccccattaattctcccctggtgtacctacctagcattcctgatcccagcttctcttacagttgtgcagtgctgcgctactttgcttttgctttgttcgcaagccggaagagagagcggccggggggggggggggggggactaggcataggtttgcacacttttgcccactgtgtctatgtttggtgcttaaccggccccttgccttgcgtgtggttcccccgctttgatccgccttgtttttggccctggatgaagataggtttggtgttaaatttataaaatgccattaatgccttgtggggttttgcccattaacatgcccccccattggatttttggggtccattagattgtggtgggg

SEQ ID NO: 563 - DNA, 635 bp, Bos taurus
  Clone ID: LIB188-021-E1-C5
gtttagctgtttccttcttagccttctcccagatacgttactgcccctgccccgcctcctccttataccttttgttttagaaaggaacgtttgctacttatactgcgccctaacctagatggcgccccccacaaccttcgtacctactagttggcagctttactgaaccaagccaggaccctataccctgtacacccaacaccttacaccaaaaacaacaccgagccgctccacacccccgaaccgtttttttacgtggccgtttaccccaaaacaccttacggccgttacggggcgcccgggccacaacccaagcgaggacgaactataacccccaccttattcgtccctatttttccaacacataccttaccttttaatttgcctacaacccacgctcacactgtttacccctgtgtacccaagcgtaagctgaaaaaaaaaaaaaaaaaaataatagagagaggaattaggtatccaccctacccctaccctgctatactacagtacaccagtgcctctcctagtttcgacttccgtagcttgcttgcacaacttttctccggccgttttagtgcgaacttaagtataggtggctttgttgctacggccggcgttcacaacgagtatgacgc

SEQ ID NO: 564 - DNA, 422 bp, Bos taurus
  Clone ID: LIB188-026-E1-H9.M13F
cctcaaggccctttcatcgtctagctgtttccttcttagccttctcccagatgggcctatgttatgcgggtcaagtttggccagtagccacctagccggtttactcgtacacgaaagtgtatacttgcctagtagtggacttacacgcaacacccgtcacgtaggccttataaactatcaccacaataacacgctactagtgaggttagccaccgtacttactgttgctgttaccgttatcgccaagggatgacggttacaaagagggtgacgatggccttaactctgtccagtcctaacccctattacgtggcagtgcttttcgctatacttttattattaccgtactaagcaaccgcgttgtacgtgttttccactcagcacatattagcatcttttatttcggccatgcccttactggg

SEQ ID NO: 565 - DNA, 402 bp, Bos taurus
  Clone ID: LIB188-026-E1-H9.M13R
atatgagacaagatgtaactgacctcgttaatctcggcccactgtgtttagagccgtcattgctagctccttctatgacgcagatttcccccctcccccccacctattgccccttgttgtattgctgctgctttactgttttctattactttaggtgcgtttaatgcctataccttgtacccactattttaaccttatcagtgtactttaaaccacatccgccgaccacccccgaatttttactttactagagaccgcccctgcattggaccgtggcccatgggccgcgcgactgaaacctatggcaactgcttgtgccctggcccccggtttacaccctatccgcagcctatacgcccccgttacctgctacaagacgtgtttttgcgaacccattcccta

SEQ ID NO: 566 - DNA, 703 bp, Bos taurus
  unsure (521): Clone ID: LIB188-026-E1-H9
agctgtttccttcttagccttctcccagatgggcctatgttatgcgggtcaagtttggccagtagccacctagccggtttactcgtacacgaaagtgtatacttgcctagtagtggacttacacgcaacacccgtcacgtaggccttataaactatcaccacaataacacgctactagtgaggttagccaccgtacttactgttgctgttaccgttatcgccaagggatgacggttacaaagagggtgacgatggccttaactctgtccagtcctaacccctattacgtggcagtgcttttcgctatacttttattattaccgtactaagcaaccgcgttgtacgtgttttccactcagcacatattagcatcttttatttcggccatgcccttactggctatcttgctacccatgtccgtatacacttaagtgccggtatgggtactaccacctacggctatcagggtgtctgtatccttggcctcagttctggccccggccgtattcgcaccgtagttnttattattgccagtttgctctgcctacgcaatggtgcttaactggtttacgtagttgccgtcaaacccgttgtcagacatattatgcccgacgtttgcagcaaacatggcgattagctgctaaaaccccatgcaggcccttggcttgggtaaaatacattctgaacccacccccatgatgac

SEQ ID NO: 567 - DNA, 355 bp, Bos taurus
  Clone ID: LIB188-027-E1-B1.M13F
ccacatagtatgcaactacaccggtgcgtaaagtaagatgcgctgctactggccgttcggcaacaacttatagttcccagatacaacaactgttgatagggattgctgggagcagcccgggtgggttttgtgctctgtagtacggggaagaccggaaaatattctatatacctggttgttaaaacatgcgttaacgtgccacgggccggacaatgccacctttagcgaaattaactggcgcctgcccagcccgccctatgcgttgcatatagcattcgcaatccaaaccccgccccaccacgaacccatctgcgttttcctgatacataggtacggtgcaattgttgtattcgta

SEQ ID NO: 568 - DNA, 686 bp, Bos taurus
  unsure (492),(512),(546),(585): unsure at all n locations; Clone ID: LIB188-027-E1-B1.M13R
atatgagacaagatgtaactgcgctcgttaatctcggcccactgtgtttagagccgtcattgctacctccttctatgacgcagatatatatatctctatatatatagatataacgtatagctaaagactgtggtgtacgtttgcttattaatactgtggcttttacttacaaagccttactgtctgcgtgcgtgcgtgctttgtgttcgtgcgtttgtacacaacatatacacggagtgttagctgcgtgcgccttaccgcttgctatttgtgccaatgtatacatgcccgtggttgggtgtgttagggccccaaaccaatttgtaccatgctgcttggcctttattccgtagctgttttaacctgcccctacgtaggttttgttacctttgccttccctttacatatactgggctgccagcacttttatgcagcttacaaccaaccgtgcacctgctgcagcgtggccctgccactgtccttcaacgcctnccctgcccgccactaacacntcaacctttactgctattcagcacacaatggggngaggtgggcacttgcaccccacggtgcccgctttggggnggggggaaggtggggggaaccaaaaaaaaagcaggaaaatggtaaactgcagggggtggccgatacaaaaatgtagagaaaactaggattttgcgtgcctc

SEQ ID NO: 569 - DNA, 608 bp, Bos taurus
  unsure (556),(578),(591): unsure at all n locations; Clone ID: LIB188-027-E1-B1
ttcatcgtctagctgtttccttcttagccttctcccagatacaaagtagggccacatagtatgcaactacaccggtgcgtaaagtaagatgcgctgctactggccgttcggcaacaacttatagttcccagatacaacaactgttgatagggattgctgggagcagcccgggtgggttttgtgctctgtagtacggggaagaccggaaaatattctatatacctggttgttaaaacatgcgttaacgtgccacgggccggacaatgccacctttagcgaaattaactggcgcctgcccagcccgccctatgcgttgcatatagcattcgcaatccaaaccccgccccaccacgaacccatctgcgttttcctgatacataggtacggtgcaattgttgtattcgtaacaccataacagcctatctaactgctatgcatttactgtggcaatactccaactgtagaatgctaaacctgatatgcaggaaaacagataaagatgcgagtaacggtgtgcgagtacgagtataaccggggaaaatgcagctggtatgancaaatataacttacgataactnggggggggggggnggggggggggggggggt

SEQ ID NO: 570 - DNA, 468 bp, Bos taurus
  unsure (65): Clone ID: LIB188-027-E1-H5.M13R
ccactgagtttagagccctcattgcaacctccctctatgacgcagatatcggtatcctgataganctaaaccccgtccgggctttttgggtgccgatatgcacttggggacttgggcttcctaggtgcgcctacatacgcccccgacgcgagtgccgcctgggataccaactaccacactagactcttactgcccgaggtaccaacttcattaccatttacgttacgccttatcaaactatggtatgatacctttaccgtacgcgggcaccatgtagacccggcgaattacctcgcatgccctgttgcggtcaccatcgccggtgtattaatgccgaagccctacagccgcactccagtgcccgcggtctgcctagtccccctgtgaacttgcaaagatctctacactagttttcccaaccgcctccgcaagcgcaaaagcgcccacttcctccagatcgacaacaac

SEQ ID NO: 571 - DNA, 635 bp, Bos taurus
  unsure (277): Clone ID: LIB188-027-E1-H5
gctgtttcttctgccttctcccagatggcttgaattatttccgtttctgtatcgctctcgcttatcctgctcgccctagtggcgccagaggcactgccaaactgcttggtggtaatcgagtctcctgtttataggggtattggtattcatattggttcccagctggctctcgagggtacttgacactttatcagcctactcaatatttacagttcgattagtgctttaggattacggccgcacaaatatcgttgtcaacaccacatacctcttgccnataatttgagcacgttgtaaatatgcattgcccttgcgacgcaacgctgggtcgccttatgccatgcccgttgccctcctggttgcaagatttactgcctctgagctgtgttgctggttgcgaaacttaatacagatatgaattttatgcgtgcttatacaagcttcctaaacctgaaaacctgtacgcgactacaaaccccctaaacacacattgggcttgagcgacagcgcaatcgcgagtatgacgctccttcttgctaccgtcattagagcccacactgttttaatctcgccagctagactggcacgaggtgagacccgtattgaaagactggcctcgaagtagccgtagactg

SEQ ID NO: 572 - DNA, 334 bp, Bos taurus
  Clone ID: 01-LIB188-007-Q1-E1-A1
gatacagccacagtcacaagaacggcagggtcggcagcgacagggatgggaatgatgggtgtgccatccatagtcctgctgtgcagtcctccgaacctcaggggcagcatgaccgtgcatagctccggacacactggtggatgatagccagtttctcttcgacacacaggaaatagcggtcccccagcccaaaattgtggccacagatcccctaacgaggacacaggcaacgttgtagcttcttctctagcatcacaatggtggctacaaactgcgctctccaaagctcatcccgctcgtgggctacaccccagtgagtgtcacccatcataac

SEQ ID NO: 573 - DNA, 422 bp, Bos taurus
  Clone ID: 01-LIB188-007-Q1-E1-A9
gccatgggaccgggataccagttcagacacagctttgcagtcgtaactgaaaggagaacagagttccaggccgcagcatttgtcaccaaggcccgagaggccggcccttaagcctgctggctgctcagtttgacccccgtcaagctgccgtgcatcgggtcggccaccccgtcggccatgctgtcaaactgctccccatcctcactgtcaatggtgctgttctgccactcgatctgtggggtggataagcgctcatcgttttcagtggcattcttccactgtgactggtccttggaccaaaacccttcaacttttccataggaactattcttccacttcaactgctctctgtctccttgcacggtagccttttttttggcaaccggcttaatgctcctcggcgtcgtcacccggggaaggac

SEQ ID NO: 574 - DNA, 247 bp, Bos taurus
  Clone ID: 01-LIB188-009-Q1-E1-A9
accgccgccaatacccacattaacctggatacctagaactgctaaaataggaagagcttctgcttttcacctttgctactaccttccctcaagcagataaataaacatggacttacatgtccttcaaacaaaaaccaaagttttggatttccacatggtattgatacggaggccatactgttccatctgccaccagtttgcccagctcacgttgcaccacggacaacgtcctgccccaggatggcca

SEQ ID NO: 575 - DNA, 367 bp, Bos taurus
  unsure (358): Clone ID: 01-LIB188-011-Q1-E1-A1
accattgacaatcagtagataacggtcaattcttcctaaaccgacagccacgacaattaattgctgacataagagagtcatgacctttcctcaagtgaatggagaatctgaacaccttccccaatgggcatccaatccatctaatcgccaatggaatctccaaagtgttcagtggccatagaaaatatgaagatggattcgagactcaattagaaacgcacgtcttggtccaatcagtggtgattttatttcagtcagtgacgtcttgaacccatgcaggaagatatgatatgaatagaactcttactaacgtttgttagtggcgtttacctttctgaatgtgtctccacaacacagnaaggtcaca

SEQ ID NO: 576 - DNA, 278 bp, Bos taurus
  Clone ID: 01-LIB188-011-Q1-E1-A9
acatgtgagagtgtcagcattccaacaccactttatttcaaacatcattagaggtggcacctatgcccacctctgagcactcagtgtttcaacccctcataacactgacggtgcttctagcctgtaagattgaacaaactctggatgctataatcacgctgtgggcacatcaatgacaaacaccacagcagttcccgtatgatagcttatctgaacatcccctgttatgaacaatccaaggagctggaagttccagtcatcaagggttcaaacacgtc

SEQ ID NO: 577 - DNA, 404 bp, Bos taurus
  Clone ID: 01-LIB188-012-Q1-E1-A1
acattctaaatgttacatttaactgattttcagtcttttttgcctttccaggaaaaggaaaaattttacacagcatcctcacttagtcagttacctactgcccctaaaacatctcactctaaaaacactggcatccacatattcacccgctttgcagaagacacagacttgtttgtttttgtttctaagtttcaggatatagtaatatttaagccattctcctgtctctttcatggagaagccaagttcagaaaaggatccttcaatccctctaccacagggaccagttgagatgtccagagccactgtgtttctggaaaggcaagcaaggtgtcctaactcacaggcctggaggccagcacccatgtcacagctgttacaggagtgcttgttgctcaagtttc

SEQ ID NO: 578 - DNA, 334 bp, Bos taurus
  Clone ID: 01-LIB188-015-Q1-E1-A1
aaagaatagttattttgtgtatatacatatatacttgcatgatatactgtagtcaatgttctgtccctccagaagtcttgctgctgtcaagcgtcacgcactaaccgcacccaccctaactgtattaaacacacttcacgtacgtaaataaacctgcgacgtttggcccccgtgcttttgtgtcagcgttcttgatggggggtctctgacagcttcgtggagtttatggagtgattcacggcacggtatggctgtgcgctgttgcagcattcttgccgctaataagggcaccgtgttcgttcccattggcaatcaactatccttgtccctttcg

SEQ ID NO: 579 - DNA, 460 bp, Bos taurus
  unsure (310),(353): unsure at all n locations; Clone ID: 01-LIB188-022-Q1-E1-A1
atgctcacggacgccatggaggccggatacatttcttacctgatggaaggtctgtggttgataccgttggaggaaagcggtttatggttttaaaaagaagaatgaaagatggatattgcaccgcagacattgaatacctggaagatatttaaggttgatgaatgacagatgaacattagaagaaacctctcgggcagacttcaatgaatttgggtctaactcctcagagccctgcaagcttggtttcaagaaattaaggagaacaaaatttccaagccaagattcttcagcactttggatcaatgcctgngcgggaagaaaacctgcaggcaatccctaatggaccggcctgntgttggtggcttcttgctgtccttcctgttgacccccgctatcagctgtcggttttgtcaatgaagtcattgaaagaacggttgacaaagatacagcatatactgac

SEQ ID NO: 580 - DNA, 288 bp, Bos taurus
  Clone ID: 01-LIB188-025-Q1-E1-A1
acacacatacacattatggggaatgcagatggatagattgacttcaggattgggttcaggtgattgtggacgctgacaagtctgaagtctgcatggcaagccatgcaggctggaatgaattgcagctggaatctgaaggcagtcactggaagaattccctcttcccgatggaagttagggcttctctgagaactcaattggtacagaatctgcctgcaattcaggacaccctggttcgattcctgagttgggaagctctgctggagaaaggatacactacccactcca

SEQ ID NO: 581 - DNA, 232 bp, Bos taurus
  Clone ID: 02-LIB188-001-Q1-E1-A5
acgctaaggattcggtcgttggcagtgctggaggtgagggacggggatgcgtttacctcgatcagccagggcttcagcttgtcatcgatgatgatgtcgtagccgtagcactcgaagcagtgcttgtcgttgttcatcacgggcgccacagccttcagggactgcacgatgatccagtggatctcgtcgaacagcttgctggtcacctccttgcctcgggtgctctccaggt

SEQ ID NO: 582 - DNA, 442 bp, Bos taurus
  Clone ID: 02-LIB188-004-Q1-E1-A9
tcgttcaacactaaattagctctcagctcaggcagaggcccggtctcctaacactgctcctgctgggccagtggcacaatttccaagactgtgtttctgtgaagtagtgtaagatacagagttgaccagggaacccagctacacctggcaaagcaggcagaggggtgggggtccacctttaacaatattgccatgtcaacaaatacttttttgagatctactttgtgcaaagtatactaataaactctaaccaattcagttacagatgtattatttctttctctaaaaccttcagtcagggcctatgtctggaaccctaaaagtaatacttttaattcttaagactggctttaaccaaatcaggtgcccaactccttcaaactggggtggacgatagataatgagagactgagttttctaaggctgaagtttaacagaagaa

SEQ ID NO: 583 - DNA, 257 bp, Bos taurus
  Clone ID: 02-LIB188-006-Q1-E1-A5
gatacaaacgcaacagaacaaggggagcagacacgcgtagggtaagaggggctcggtgggagaacgtcacggggcagatggtgcactggggccaatagagcagcacacagaccatatctagagggcaggcggggtacgaaggggtttaaaaacgagatccaagccagccagatcgcagggaggtgcgggggtgtcgtccactttgtccaccttccgatctccccccaaggtcacagtgcatgcaataaaatatatgt

SEQ ID NO: 584 - DNA, 367 bp, Bos taurus
  Clone ID: 02-LIB188-007-Q1-E1-A5
ccctggatgactcgataactcgaaacactgagggggtaagaagcgacaggtgggtgccaaaggggccgcccagccacagtctttccgtgccgtcctccgagcctgggtggcagaaggcctgggcatagcgccggacacgctgctggttgatatcctgtttctcttccacccgcaggaaccagcggtcccccagcccaaacttgtgcccacagatccccgagcgaggccacaggcaacgtggcagcttcttctctagcatcacagtggtggctacaacctgcgctctccagagctcatcccgctcgtgggctacacgccagtgagtgtcacccatcatagcgatgaggaggttgagcatgagcaaagc

SEQ ID NO: 585 - DNA, 445 bp, Bos taurus
  Clone ID: 02-LIB188-013-Q1-E1-A5
cgccatcggggcgggataccactgaagctctatcccgccttctttggctattacttcttcaatttcatgatgggagtgctacagctgctgcatatcttctgggcctacctcattttgcgcatggcccacaagttcataactggaaaggtagtagaagatgaacgcagtgaccgggaagaaacagagagctcagagggggaggaggctgcagctgggggaggagcaaagaaccggcccctggccaatggccaccccatcctcaacaacaaccatcgtaagaatgactgaaccattgtccctgctgcccctcagattaacgtataaagccaaggaaataccccaccctccccacagggtcactttaagctctggggagaaggagaaagcgagaggagcgtgttcttctctgtgccccaccccctgctactgtcacccagttgccttt

SEQ ID NO: 586 - DNA, 317 bp, Bos taurus
  Clone ID: 02-LIB188-014-Q1-E1-A5
gccatgggcgcgggatactgtgtcacacagctgttggaagatttaatagtgaagtatctgcctgatgagctgtctgagagaaaaaaaatatatgatgaagaaactgctgaactctcacacttgaccaagaatgttccaatatttgtttgcactatggcctatcccactgtgccttgccctcttcatgtatttgagccaagatacagattgatgattcgaagaagtatacagactggaactaaacagtttgggatgtgcgtcagtgatacacagaatagttttgcagactatggttgtatgttacaaattagaaatgt

SEQ ID NO: 587 - DNA, 127 bp, Bos taurus
  Clone ID: 02-LIB188-014-Q1-E1-A9
tacctgtacctagcttttgagcactgccatcgttccatccagaagaacatccgaatggtcctcatttacctgcttcctgtgaagatgctcctgggcgacatgccagccattgcgcttctgaggaagt

SEQ ID NO: 588 - DNA, 345 bp, Bos taurus
  unsure (214): Clone ID: 02-LIB188-015-Q1-E1-A5
acaaagacaccacaaatccaatagcacatgctgcgaccaaaaccttttccgtggatctgagaaagctttccgacatattcgatgggaaacgagcatcagacaaggagccggttccgatctgctaacatcctgtgtcgccttcaaggggtcagcttagccaggtcggtcattcaagtctctcagtctcaagacgcaagtaatagcggtgacaganacggttcaacgcgacccaaagcctaaaggcttgagtctgttgcttcgttcctggcaacccaataagtcctcgccccgttggccaacggagctccaggcttttcagaaacgtcgctgggctccggtatcact

SEQ ID NO: 589 - DNA, 272 bp, Bos taurus
  Clone ID: 02-LIB188-016-Q1-E1-A5
cggagaccggatacattttggaaacccgtggcacctttcaacacaggaaggtagagggggtttctctcccctgcttcaaccccttcttttgatagcatatatatgatggtcttctgggtcagaggtggggaggaagtggagagtgagccaagtcaagcactgaggccagttgagagcagcatctgttcaaggcttcctcagggcttgtgtggtagacagcaggccccccggcagtcacctggttctctgaagctgcctggggcctctctggt

SEQ ID NO: 590 - DNA, 416 bp, Bos taurus
  Clone ID: 02-LIB188-026-Q1-E1-A9
actgcatattccattgtcgagagggaaagaaacaggctttgaaggctcttgctcgtcaacagcacgtgtgtctgtagttgtatattgtgcatgtatttgtgtagatttaaattttctcctaagattttcactgacaatgtcagtaacttcaggggctttcaaagcattaaaggttgaatcggtgaatttttcacaaatgctcatgttagagagaagacccaacccttccttaaggactatctatctgcgtcaccatctgaggatcttggaaatgttttcatggaggtgtacaatttaacgcagggatgaagcatatatctctgacagccaaacttgagttcgtcagagagcagatgcacataaatctggtctggcttgccctgtgactgcggccgctgcagaatctccccaaggct

SEQ ID NO: 591 - DNA, 214 bp, Bos taurus
  Clone ID: 02-LIB188-027-Q1-E1-A5
atgggcgcgggatacaagcttatttttttttttttttttttttttttttcaaaaacttttttttaaacaagaaaactcagaaaatgcattatttgtgatgcatccattccatcgtgccttctggttcaatttttttttttttttttggcccaaaaggaaacaaactccggcaaaccccaatctcaaactcaatggcttaaaaagcaaacaagtg

SEQ ID NO: 592 - DNA, 268 bp, Bos taurus
  Clone ID: 03-LIB188-001-Q1-E1-A3
catggccgcccgatacaaacgctacagaacaaggggagcagacacgcgtagggtaagaggggctcggtgggagaacgtcacggggcagatggtgcactggggccaagagagcagcacacaggccatatctagagggcaggcggggtacgaaggggtttaaaaacgagatccaagccagccagatcgcagggaggtgcgggggtgtcgtccactttgtccaccttccgatctccccccaaggtcacagtgcatgcaataaaatatatgt

SEQ ID NO: 593 - DNA, 331 bp, Bos taurus
  Clone ID: 03-LIB188-004-Q1-E1-A3
cggatactaaaccaaggacttgttctgcaattgggaaaaatacccaactccgtgggccaaaaccggtccaaccaaattaatggccggggaaaaaaagccaattaaattcgctcccttgaaacagggcaactggattggggcctcaagcacaaaccaacccaaaaggtccagttcccgttttaaccggaccaaaaaggaattttcccccccgtccgcccccgggggaacaacccaatttaactccagaaccttgacccgaaacggcaccataaattggtaacggggccttgggctgggctggcctccgtggacatctcacccccaaaagcag

SEQ ID NO: 594 - DNA, 333 bp, Bos taurus
  Clone ID: 03-LIB188-005-Q1-E1-A11
gccatgggggcgggatactgtgctaacgactcacagtgtgagccagagagtaagactttatgggccatcaagaggacatgtgtcgtcgcgtctacagggcagttccagtctcactgtgcagtatgttcttaagccctattagcttcattcttttgcatacactactttgaaactgtgtaaccccattctgcctaatatttcttactagcacagttagattgttctagtttgatcttgtccacacatgagcagccttgggaacctgatacatgtaggatcggggtcagtcagccatcaggtatgtgacacaggtaagacgtgtagcccatacct

SEQ ID NO: 595 - DNA, 420 bp, Bos taurus
  unsure (371): Clone ID: 03-LIB188-011-Q1-E1-A11
atgctgccgtacgccatggaggccggatacttcagtcaaatctgggtcataacctagatgcagaccttgtttccagcgttagatgaaggccagaccaaggggtccccgaggtccttcctcttgagctaaaacttgcatcttgttactggggttgtaggggggaaggtgtggtctgcatttgccagatgggcaacgaattagaaaaggaagcaggggcgggggttactgacctcagctggcttgagggcagagcatcctttccttgttgtgccccagtattgtagtccagtcctcgatgccacagtatcatgccagggctccgtgcccagcaaatgacagttgcagaagttcatggtggagcaacttgtcanggccagggcacctcccaagaagaccatgggtgcgtttctgcagagctct

SEQ ID NO: 596 - DNA, 108 bp, Bos taurus
  Clone ID: 03-LIB188-013-Q1-E1-A3
ccctccaacttggaaggcacaaacggcccctaaggccaaaggtgcttacctttaggcccaagttccttccaagttttggctggtggcaaccatttaagcccttttccc

SEQ ID NO: 597 - DNA, 389 bp, Bos taurus
  Clone ID: 03-LIB188-017-Q1-E1-A3
gatacggctccacccactttcgcagaaccaggtgactgccggggggcctgctgtctaccacacaagccctgaggaagccttgaacagatgctgctctcaactggcctcagtgcttgacttggttcactctctaattcgtcactacctctgatccaaatgaccatcagatatatgctatcacaagaaggggttgaagcaggggagagataccccctctaccttcctgtgttgaaacgtgccaccggttgccacaaagtactgatactgtagcatttgatatggaaaggctcaccagaacccaagcggttaaccgacgatcggccctaggtgagctcgccagcgacaactcacttggccttgagccacttcgcacttcggggatctcgcct

SEQ ID NO: 598 - DNA, 245 bp, Bos taurus
  Clone ID: 03-LIB188-019-Q1-E1-A3
tttttattgtttttttttattttcttctgttttttttattttttttattatcatattcttgatttttctaaatttctgtgtgtttaaatattacatttgatttatttcattttacggggacaagtaacaaatcattatttaaataaccatcatgccacatatgcatttaggatgggtttcaaatcaaaatgtcagggaaaaaccgagccattcaagggaacgggagtgccccccgtccccaaaat

SEQ ID NO: 599 - DNA, 361 bp, Bos taurus
  Clone ID: 03-LIB188-021-Q1-E1-A11
gccatcggcactggatccacagtggcagctggggtggcagcggccacaggcccctccccataaattaagtccctgcatccacagctgtgggcaaggcatacttgtcgggggacaacgccgtcacgcaacatccttgatgcccagctaacgaatggattagggcacagggctcacagggaatacgccatcggaaaaataataggtatggtgcggataaggggtaaggtcgcccccagtcttggtcccattggaaaagacgccagttggtccagttttgtgggtttggagaacggaatgtattactaagcacaatggggaggccaccgtcaggcacccccggaagagacacgccaggccccaa

SEQ ID NO: 600 - DNA, 231 bp, Bos taurus
  Clone ID: 03-LIB188-024-Q1-E1-A11
cgccggagactcgttacaactctcaatgtgatcctctcagtgctgggcggtgttcaaatccatcgtgacgggtgtccgttatatgggcagtatggcacatggcataagatctgctaatcgagggtctctgaggattggatcggtgcagattatgcgcatgtcaatcatccacaggtgttggatgtctccatatcagcagctgatgcgctcatatccttctcacagcaaact

SEQ ID NO: 601 - DNA, 251 bp, Bos taurus
  Clone ID: 03-LIB188-025-Q1-E1-A3
ggaccgggatacacatgtaatcaccaccgtgaggatctcggccagtgtacactctttaagacaacctagttccctggcccagtcctgcacaaacttgtcgggtccacaataacgcagctatagttcccggaacaagcatgtccaatggtcctcgccagaccggatatgcatttgccaaatcttgatctatcatcgccaaaaattgaatgtaaccaagttgacatctgatttttcatccagtgctccctgaa

SEQ ID NO: 602 - DNA, 250 bp, Bos taurus
  Clone ID: 04-LIB188-001-Q1-E1-A11
acacgcacggcaacacccgagcgccacaaatccccattgctttgccctcccatctcttcacttgtgtattcactgatgagaaaagcaaaggaaacaagatgtgattctgtcggtctgtgctctagttgcagtcgcactgtgtgaacactgtctgcccaccgggggaagtcctatctgctgctgccacaatatagtcatgctgcttgtgaagtgcagggagttgttttgacactggcacccactgtaatgt

SEQ ID NO: 603 - DNA, 250 bp, Bos taurus
  unsure (247): Clone ID: 04-LIB188-008-Q1-E1-A7
tccacgtcgtagttgggggggccgtcgatgatggtgaggaacagctcaaaggtgctgaacagtgccatggggtaactgtagaaatggcccagctcattggggtcctctgtctggaagatgataaagaaggccgaggcaaagcccaggatgaccacggccatcagccagcagaatctcatcagatcgccaaaaatcatcttctggatcatgatggtgaaggggcccagcatctggaatcctcgcgcanagt

SEQ ID NO: 604 - DNA, 378 bp, Bos taurus
  Clone ID: 04-LIB188-011-Q1-E1-A7
gccactgggcgcgggatacacacggagaactctgggaaatggtttgttcctcagactggaaatgccacaacctgagcttacactcaccgcggtccctggtatgttttctcgtcaccctcatgacttcagagacttcagacttgtggtcctttctctgttactagttctacacacctcacgcgacttccttcctcttaagaggaatttcttgaatttcttaggactttctcattttgaaagagtgtagcttcatattgcttattattgggtccttttgtttgctttttaactcgactcacagtctgtcttcccctggagggcatgcatttcagtattatataaatgcaataaacgggttataattatttacaagcacct

SEQ ID NO: 605 - DNA, 374 bp, Bos taurus
  Clone ID: 04-LIB188-012-Q1-E1-A7
acaactgtattatttgtagaaaaccagaagtgtgttcatttatttcttactcccaaataggattaactgtgaagattaatttataaatgtgaacttaagggaaactgaagctctgaaggaagtagtttgaattttgtttttacactcaagttaatcctcaaatggtctaatcgtcactcactaacttggtgacagttcagccctccagacaagacagcgcatgtgtccgccccactggtgtcctggtcaggcctctatggggacaaaggatttgggtctggccagtgtgccgatttcctgtgtgaactctgttctactgtaatactgtcgcgtttgagagattttcttcagatgcagcctctgctttgtatcac

SEQ ID NO: 606 - DNA, 356 bp, Bos taurus
  Clone ID: 04-LIB188-020-Q1-E1-A7
gggatacaaatgcactaaccggcattccacacgggagcaggaagagtaccaagtgcttggctccagaaggatttgtgacaccgaagatgcgtcctcaaattagagcggttcaaaagcgctgaggggttcagccttcaacatcattatagtatgacacatggatgaccatcgcatatcaaaatgagccacatctctatagatatgccaagtttgatcgtacttccacagctccttggatacggagtgcctgactatgagtaccatcagttagcgagtgaacggtctccaatatagctcacagcgtcgaaaagttgttaacatgcacacagtagaatatacttttctaaagatatatc

SEQ ID NO: 607 - DNA, 369 bp, Bos taurus
  Clone ID: 04-LIB188-022-Q1-E1-A11
accttttgctgctttgggataagactgttttcctgtttagattttaagcattgccagagagaagaagctgttctgttcttttgattgtggcacagcctgatagctctagctgcagcccctctgatgaggaatgagtgcctaccaggacatctgggcaactagctatgtttcctcggactccagcttagttggcactccattgcctgtgaggacctttctggcatgtgattatttacttcagaattagagtttcgggcacctacgttgactgttttatatcatgtgcagaataatacatcttttaatgtcagatacaatacactgcacatattgcttttgcactgttttaaaatttttgtatcactagtg

SEQ ID NO: 608 - DNA, 358 bp, Bos taurus
  Clone ID: 04-LIB188-028-Q1-E1-A7
ccatgggcccgaaatacattgagctggtacttatctgaaccacagcacgtaggctgtcctgaaattgattcactggaggaatcacctctcgaactctagtacaggcactgcgttgacagacgatgcttatgagcgtgccctcttaactgggagggtactatgcatcccctgatgtcattagctgcatatcttctaggccccatttccttccaatgtgtagctggtggccagcattttagcccttgcccccactcagtgctgtgtgtcccaatgtctgcagggctctagcatctggtatagggtccccaccgtttctactgagcctaatgatacacgatgtacactgatacgaacacct

SEQ ID NO: 609 - DNA, 145 bp, Bos taurus
  Clone ID: 05-LIB188-004-Q1-E1-B1
cacaaaagacaaaggtgagcaaactcacttgcgctgaaacgcgtccgccagctgaacatcacgggggatttggacacttgaggccaagggatcgcaatccaggccaaatttccagggaaggcctcttagccaaggcttaaaaccc

SEQ ID NO: 610 - DNA, 381 bp, Bos taurus
  Clone ID: 05-LIB188-006-Q1-E1-B1
gggcgcgggacaccattttattttatttttttaaaagacagtgacgttggttttatggatcaaaaccagaattttcatgtttcacaattttggtgctagagatccccaaactgcctaactcactggggaaggtttctgaaggtgtgcattatagtaaacagcagcaaaatacccaacaacgttactgctaaaagcagctgctcctgcttgcgcctttagaatactagccgtaaaacagcaaaaacccgcacatctgtgtcagcagttgggatgtgagctactctaaacaacaaacaactgtgaacagtccaaggcaggacctctacaatcatactgggcaagcgctgagctgtggggagaaaatgtcagcacatgcccaag

SEQ ID NO: 611 - DNA, 452 bp, Bos taurus
  Clone ID: 05-LIB188-008-Q1-E1-B1
gccacggcagcctgcataatttttattttttaattgccttgtttgccttcagtttccttaattttcatggtttacatggatgtgtgtgtaggggctatatttgtgtatatacacgtgggttggggtttttgcatgtgtgggttccatggacgtatgatccccacaagctgtgggagtgattggccaggccttgtttttttaatgtgtgtttttgttttttcgaagaagaggatgctatttagaaaagaaaccgcattgcaaacctcttaccagctcatatgagagagcagattcctgcccttgagcacgctggtaagttgttatcataaatgttttaaaagagttttgagcatttcatgctttaaaagaccttcacagggaatatgacacacaaagttcttttggttttcctttgacgtaaggtgcataaagcaataaaaatttctttcccc

SEQ ID NO: 612 - DNA, 353 bp, Bos taurus
  Clone ID: 05-LIB188-010-Q1-E1-B1
gatacaatgaaaagccattttctttcacaaaaagtcactgcaatctagaagtctaactgggactaaagcttttgaaggcgaaagcccatggccccttcctgagccagagctcaagcagggatggcgctggtctttctaattcaagatctggggtgttcagagcaaatgtgatgcgggaagaccaagacctgggttccacagtggacatggatcagtgcaccactggggttacttgaaagactggagggaggggagccccctgaagacagaaggaaatatgagacggtctggagaggtcaatagcccaggaccctgtgacaaaaccctcctgccaacaaggacatgtgtcaggt

SEQ ID NO: 613 - DNA, 379 bp, Bos taurus
  Clone ID: 05-LIB188-012-Q1-E1-B1
gccataggcgcgggatacatgaaaaagagtacaagttttaaaaattcttcaggagtccaagctgggccatgactattaacgatggggtttactcaaggcactgattccaagtttgacgaccatcaacaaactggcacctgcaatcaggcctgctggcatgaattttctagagttgtagaatctcatccccatgatgccagccaaggttccagatgtgactaagaaaagccaaatgttcttcggatcctgagacagctgataggaccccaggccggcgagaccaccgaagaggagcccggcagccagggatggaacactgcctgcttttgcatagccaataatcccgccggaagcaaccagtgctgcatagccaaagcca

SEQ ID NO: 614 - DNA, 389 bp, Bos taurus
  Clone ID: 05-LIB188-015-Q1-E1-B9
gggatacgagtcaaacttcatcaacatgttgcaatgtgcagaacttatgaaaacttacaatgtatcagatgtcatgcgtactacaagtcactagtgcttgcctttaaattgtaagagagtattgtatacgttacattatcctgaaattacagcaggattgttacgattcatgcctgtgtgagatctagataattaaaatctatactgtattactgctgtcatcaaaatctatccttgactgtgttcaaggaggaaaattgtgtatcacaaaccttttatacgacatgccgataactcttaagcagaatatttttaattttcgtgtcaatactgaaactttgatgttggtgctgtaacagagtaagactgtatctgtcacaaaaacatga

SEQ ID NO: 615 - DNA, 397 bp, Bos taurus
  unsure (247),(378): unsure at all n locations; Clone ID: 05-LIB188-016-Q1-E1-B1
ctgataaaaggtctgtggttgataccgttggaggaaagcggtttagggttttaaaaagaggaatgaaagatggatattgcaccgcagacattgaatacctggaagatattaaggttgagaatgaagatgaaatagagaacctccggcaacttcatgatttggtctactctcaagcctgcagctggtttcagaatttaagaggcagatttcgaagccagattcttcagcactttggatcaatgcctgngcgggaggaaaacctgcaggcaatccctaatgggacggcctggtgttggtggcttcttgctgtccttcctgttgacccccgctatcagctgtcggttttgtcaatgaagtcattgaaagaacggttgacanagatacagcatatactgac

SEQ ID NO: 616 - DNA, 153 bp, Bos taurus
  Clone ID: 05-LIB188-017-Q1-E1-B1
cgatggagacacctgcttgcagatacacatgtgctgggaggtgaacagctcagccagcatgggacagccattctaaaccgcgatatccgaatgcggtcgcctgtcaggtcgtcacactagaaagctccctttgtcttcgatgtagatcgtcat

SEQ ID NO: 617 - DNA, 411 bp, Bos taurus
  Clone ID: 05-LIB188-026-Q1-E1-B1
tactcaaattataccctaaataacttgtataaaaatccctgaagtattgtgtgggtgtgtgtgtaagtgtgtgtttgttatatgtctgggaattaaaactttgtcttctggaaattagcgaattctctttttttctccagaagtgtttgttacaagatttgtaaataagagctctacttagtttgtttaccaagaacatgttgcagcaaaccttttacacctaattcccacgaagttgaagtgacgacttttaaaatttgccaaggtaagcagcagccaggttctcagtcattgttggccttgattcatctttcagacttcattttcccagctctaaaattcgcagtaatccttaattgtagtccttttatgttctataagcatgaacggggaaagagaagaccctgctta

SEQ ID NO: 618 - DNA, 418 bp, Bos taurus
  Clone ID: 06-LIB188-001-Q1-E1-B5
actgcatattccattgtcgagagggaaagaaacaggctttgaaggctcttgctcgtcaacagcacgtgtgtctgtagttgtatattgtgcatgtatttgtgtagatttaaattttctcctaagattttcactgacagtgtcagtaacttcaggggctttcaaagcattaaaggttgaagcggtgaatttttcacaaatgctcatgttagagagaagacccaaccccttccttaaggaccatctatctgcttcaccatctgaggatcttggaaatgttttcaaggatgtgtaaaaattaaccgcaaggatgaagcatatttctctgacagccaaacttgagttcgtcaaagagcagatgcagagaaatctggtctggcttgccctgtgactggggccgctgccgaatccccccaaagct

SEQ ID NO: 619 - DNA, 341 bp, Bos taurus
  Clone ID: 06-LIB188-002-Q1-E1-B5
cgccatgggcgcgggatacaagtggtctgtgcacttctggtgagaattccttgcaccactctcaagtcagctgattccagggacacgccggggcacaggaggcactaggctcgtctggaacggctctttctggcagtgacattttgatttgaaacccaaagtaaatccatacgtggcatcatggttattaaaataatgaaatattactagccaaaggtaactgcaattcaatcaatgttatattttcacacacagaaatttacaaaaatcaagagtatgataataaaaaccataaaattaaacagaagaaaatcaatttctacaataaatcatatatatgt

SEQ ID NO: 620 - DNA, 403 bp, Bos taurus
  Clone ID: 06-LIB188-004-Q1-E1-B5
cggatacagaatcaagggtgacatggatagaagacactgggataaaaggcatttcatttttcctatgcagcattttcttttggaaaatcaaggtgaccttcaaccaggacaaggaaagaaggaagaccctctgcatggggagctcagggcggctgtgggggaaagacccgagctgggctcgctcgggttctgcagctgaaatcgctgggggagtcggaggacagctcctgagttgtgcgtttccagttcccatccgtgaaatgctgtgtttagtctttgggtccgagtcgttgttctttggcaaataagaactatttgtgttccgaagcagaggaggacttcagcgggaggcgctcaggtggagctgcctcccggtcgctttcctacctgtgtcctcccagct

SEQ ID NO: 621 - DNA, 422 bp, Bos taurus
  Clone ID: 06-LIB188-004-Q1-E1-B9
gatacaagtggaagtcccttaaaatcaggttttttgaagggcattctgggatacattctaccaatcagggaaacacccactgacacttattacacccactgatttctgccaacatccccagtatttggcttctgcagctacacatttcatctgttcagcatgttctgctgcatgtgctacatcgtatgctttgcttaggcgtttaggcagtatgcatgcgacaaaaggttcacatctcactcatagccacttatctgcatcatgcacatcctatgtgtcgcaggttgggtctggccatactcaactaccagagccattctctgtaaaaggaagggatgattcttatgctgggactctgcgtttatggctgacgtgtgttcagaggatagctcttgtgtccagtggggcagccgaaactcgga

SEQ ID NO: 622 - DNA, 435 bp, Bos taurus
  Clone ID: 06-LIB188-006-Q1-E1-B5
gccatgggcccgggatacacctgaagactggtgggaccaccaccaagggggcacggaccactgttgttggctgtcggcaacaaggctggtcatggagctgctgacgccccctttcagcttcctctgggtctcacctgtcacatctactgagaggtctcacccatctatttgagaacctttctggcgccgtgcctgtctccgcgcctcctccaccaccagggggtcctctgccgtcaacacttggggtatcacgcctgcaccttggctgtttgggagctgtcgactccatggtcacttgtcttccctcatgacaccccacagtgtgccacatgctcactggaaccccgggtcgtttcttggctgaaaccatactgttccacccaaagcttgggggcctggtcccggagctcccccaaggacccacagcccttgccc

SEQ ID NO: 623 - DNA, 416 bp, Bos taurus
  Clone ID: 06-LIB188-006-Q1-E1-B9
gggataccagtgaaggcacctgctcacactcaggtgccacttctggtgcccacttgcttgtttggggatcacagtgatggttgaccagggctccctgacctatacaggcctctgctatgggggtgatggccagtcctggtgtctgagtgattccctgggcccagcaaagggaccaagtttccaggtcagcgacattggatgccttccctctgcctctgggagcggtgggttggcatgaggtggggtagcaacccaacctggcctgaggctcactctggaaactgcggggaaagggaagggaggcactgccttagctaacaccgttgaagtttctgatcttaaaagtctccgctgaatattcttctcccagagccttgaagacaaggggtaacaccccaaaatacggactcattttc

SEQ ID NO: 624 - DNA, 298 bp, Bos taurus
  Clone ID: 06-LIB188-008-Q1-E1-B9
gccatgggcgcgggatactcgtaatatttctgggccatcctggtgatgtagttgcccatggaggcccaaagagacacaatggccatgcccagagccacagctgagggcacaagcgtgtactagcgctcccagtagttggtggagacgaagagggcgtagatgcccacagccaggaacatcatccacttggtgccaaagaacctgatgagcacgggcgtgtagagcagggcggcgatgggcgtcacgttgatacccatcagcatcttgctgtcgatgtcgggcagccccatgttgccgt

SEQ ID NO: 625 - DNA, 409 bp, Bos taurus
  Clone ID: 06-LIB188-017-Q1-E1-B5
gccatggcggcgggataccaacagtccttacctcatggggttgtcctgaggaccgaaagaactcatacaggtaaagcactttgtaggtgcctggacacatcgttagctttctatataataaaaatatgaaatataataccctttctaataataaagggtaacaattattattatgctgtgcaaccttaggcaagttgctttagttctctctgtctcagtggtcatctgtgtaatggagctcctagtaagtatccacctgtgttttgtgctaattaaatgagtttatacatggaaagggcttggaatagcatcagacactctatgtttgctgtgatgatgatggcaatggtgatgatttagtgggaacctgtaatgtttccttcaaccagccgaatttctgggttcgaga

SEQ ID NO: 626 - DNA, 443 bp, Bos taurus
  Clone ID: 06-LIB188-018-Q1-E1-B9
ggatacaacgctaagctattttctttcacaaaaagtcactgcaatctagaagtctaactgggactaaagctttgaaggggaagcccatggccccttcctgagccagagctcaggcagggagggcgctggtctttctaattcaagagctggggtgttcagagcaaatgtgatgcgggaagaccaagacctgggttccacattggacatggatcagtgcaccactggggttacttgaaagactggagggaggggagccccctgaagacagaaggaaataggagacggtctggagaggtcaatagcccatgaccctgtgacagacccctcctgccaccagggacatgtgtcaggttcagacccacatggcgccgccttgcttctttaggtggacccttcagcatcgtgcctggtgtcccttgggaagaagctgtctgtctggctct

SEQ ID NO: 627 - DNA, 157 bp, Bos taurus
  Clone ID: 06-LIB188-020-Q1-E1-B5
cgggatacagcgcaagcggttcaatggccatatctttgggcttagacaccgtggtcttttcgggaaaaggcacgtctttggtgagaacagttgcacataacgcctcacctaggttcccgtccactgagcgaaacaggtgccccagcctggtcaatca

SEQ ID NO: 628 - DNA, 126 bp, Bos taurus
  Clone ID: 06-LIB188-021-Q1-E1-B5
gccatgggcgcgggatacaacgccatctgcatctcccagggcgcagaatcccacatgttcactccaagggtctctcacatcctctacagactgacatacgacttcaaaagacccacggccactgca

SEQ ID NO: 629 - DNA, 415 bp, Bos taurus
  Clone ID: 06-LIB188-024-Q1-E1-B5
catggcggcgggatacaattcatactgcgacacccatggtgcacagtctcacctgataaatccatggttctcctagacccttttaagactgacattgagcttttaaagagcccacggaactgcatttcatgtgctggaaaccaggttccctcggagacgtgtgaaaccccacaaataaggcaaagcaaggaatcattttctttctatggcaacttgctgggaaaacaaggaggcctggggagattctggattccccaagagctcagttggtaaagaatccacctgcactgcatgagaccctggttcaattcctgcgttgggggagattctgccttgaataatgtcagattcctgggtcagacatcatgacagggggaaggagcagattgaaaatttttttcacaaactgcctttc

SEQ ID NO: 630 - DNA, 423 bp, Bos taurus
  unsure (402): Clone ID: 06-LIB188-026-Q1-E1-B9
gggataaatataatctgtaaataagcctgcacaggggagcttctttaaggaatattgccccaaactcattaagagaaaagactttttaaaaaactttggactcatctggatgtttgtcgttacaaggattgcttaaagagtcatcagcctacataggaatccagcaaagctaggccttgctcagcctgaccccgggaggttaattcctatggttcaaggtgctccttctgagtcatcttagtctggacagccttctgggaaggagactaagatctgatggagtttggaggcgcgtgtgccccacagttactggtaacgggaggacaagtaacgtccttggccctagcggttcctcggctcttcctctaggctcatggtttcttagttgcgtgcacaagtgtntgtggtcccgtggtgaagggg

SEQ ID NO: 631 - DNA, 396 bp, Bos taurus
  Clone ID: 06-LIB188-027-Q1-E1-B9
acccggggggcctgggggagacacctggggcctcctcacctgctgctgcccagctccccgcaccagcccatttctgtcccaactggcacaggcctcagggagcaccccaaggccacgatctcagaccaaaggagacggtggtaggagggggtaacccccagcccagcagataggtggggctgaccttaggtcttgggactttggtgtgtagctaaaggcacttgaagctgcctctgggcttgggggttcccagagggcacggtgatggcacagtgggggtccaggcagcagaatagtctccccggtaggggacggggcagagtcgccgcctggaccgcagcactctggctctcaggagtgtcagtagtcaacgcatggtgagaagctgcagcgcac

SEQ ID NO: 632 - DNA, 382 bp, Bos taurus
  Clone ID: 07-LIB188-005-Q1-E1-B11
gatacaagtggactgtgcacttctggtgagaattccttgcaccactctcaagtcagctgattccagagacacgccggggcacaggaggcactatgctcgtctggaacggctctttctggcagtgacattttgatttgaaacccaaagtaaatccatacgtggcatcatggttattaaaataatgaaatattactagccaaaggtaactgcaattcaatcaatgttatattttcacacacagaaatttagaaaaatcaagagtatgataataaaaaccataaaattaaacagaagaaaatcaatttctacaagaaatcatatatatgtacaagctttttttttttcattttttttttttagggaatgaaaatcaacagcattt

SEQ ID NO: 633 - DNA, 394 bp, Bos taurus
  Clone ID: 07-LIB188-007-Q1-E1-B11
ccaccgggctacaaatgtactccagcgacactgtcttaaagatttttctacaggtgtaaaaccaaggtttcatgcaagccccagtccacgcccttcatgaatctactgtgtatctattttgcctcactagttctataaaagtaaagacacctttgaatccagggtttggagctgccccgcgtctgtctttcctatgcactctgaattaaaacgggactcgcgggaccgttggcggcgtgctccggtccctcagcaccttctgtggatgtggcgcctccggcctctttgtctccttcggaagtctccagggcctccggggggcttgtgcagttaacatccagcttagctttgtccacctcgttatcaatctcaagcttatcatctggatgcttgc

SEQ ID NO: 634 - DNA, 278 bp, Bos taurus
  unsure (53),(110),(136),(152): unsure at all n locations; Clone ID: 07-LIB188-009-Q1-E1-B3
gccaagggcgcgggatacaaacgctacagaacaaggggaacagacacgcgttnggtaaaaagggctcggtgggagaacgtcacggggcaaaatggtgcactggggccaangagagcagcacacaggccatatctanagggcacggcgggtangaaagggtttaaaaacgagatccaagccagccagatcgcagggaggtgcgggggtgtcgtccactttgtccaccttccgatctccccccaaggtcacagtgcatgcaataaaatatatgtatcact

SEQ ID NO: 635 - DNA, 421 bp, Bos taurus
  Clone ID: 07-LIB188-018-Q1-E1-B3
ccgcgggatacagtgatcaatctcagatcacggtctttttcagcttttaattagttttccagggactggttctagcttgaagtcctatgaaatatgtggcttgagtacaatctgttggaagagagggtgcgagtgaggcttatgaagtcagacgaggtatatgtccatgacagattctgtccaaactagctgttccattatttctattttcttcctcattcaaaatgattcagtctgaactctgctgtttctctcctcacctaactgatgaaatgtcagtgcctttgggagctaaattaatttttttccttcctcctgtgtctctgcatctcgtgtccagtaactgttccgccgtcttgaattttaactttatttattttatttatggctgtgctgggtcttcattgccttgagcgcactt

SEQ ID NO: 636 - DNA, 222 bp, Bos taurus
  unsure (86),(152): unsure at all n locations; Clone ID: 07-LIB188-021-Q1-E1-B3
gccatggcctcctccctgagggaaggctggggccgtggcccgtgcattgctgagcactgcacccctgtgccctggacacacatgancgcgtgcgggtccaactgctgtggactgtgcttgcgcacccaaatagtgcacggccatgcgtgtcncagcctctaagtgccaaaaccaagccagaggccttctgccagagccaggaggaagaggcccccaatgcgg

SEQ ID NO: 637 - DNA, 378 bp, Bos taurus
  Clone ID: 07-LIB188-023-Q1-E1-B3
cacatgcatagaactcttctcagtctctgcgaccaacagctcttgcccgagccagaaatggcgagctcgctgtctgtctgtccgcccgctccatctgtccctcagacaagacacagagttatctccatgctgtcggtggccagctgcatgcaccctctggaactcacagactgagtcttcctttctcaccatttggggaactgaaccctcacgactgctgcattggagcaccggtcatgcactccaaggctggggcaatcattctactccaggcactggcctggcccagacactgctttgctggatgagcgccactgatgccatacgtaatgtctgacgctgcatatgtcttgggctggagctctgtagacgttgcag

SEQ ID NO: 638 - DNA, 382 bp, Bos taurus
  unsure (337): Clone ID: 08-LIB188-002-Q1-E1-B11
acaagctttttttttttttttttttttttttttcgccagacaggggtaatgcttttatattagtttttctgtaacaagaaaaatcagctttgaagtttttatcatttttttttccttaaaaaagaattaaaaaaaaaaaaaggcacccagaactcccctcaggctcaaagaataaaaaagttctctcatcggtgcagctgggcccttcgctcttgctccacccagccccgccacctccgccgagctccagcccaagacatcagcagcctcagaccttccctctggcatcagtggggctcatccagcaaagctgtgtctgggcccggccagggcctgnaggggaatgactgccccagccttggggagcatgaccggtgggcca

SEQ ID NO: 639 - DNA, 420 bp, Bos taurus
  Clone ID: 08-LIB188-002-Q1-E1-B7
acacatgtgcagacacgttcgatgaagtagaggaaagacacgagggtcgcgtaaccagcgctcacagtgttcatgtcctttatgtcgtggccggattgaacggcccggccctggctcacagactctgagaatgttgcattgttccctgggaacgaccatcagtctgcccgccctcctctgcgctggtggaggcgcaagcaaggttttctaaaggcatattgataacggctttttgcaaatgttgaattgtgtttttgtttctaaattgggacttctcggtttccccttctcaccctaatttgacgttagaattctttcttcctgcatcaggtcctgtgcctttgactcgccgcaggccacatccaatcccttcactgtccacacggtgtcttggggagtgggcggctagagtgtgggcct

SEQ ID NO: 640 - DNA, 436 bp, Bos taurus
  Clone ID: 08-LIB188-004-Q1-E1-B11
ggatacacaacaaggagaaaatgtggttcttgccccttgaggagcttacacgctgggtcggggtgggggtgggctgacaactcacagtctataagagctgcatgaacaacaaagtaatttattaaggcaaattcttcatcccttcaagataattgtgggtagaatgattttggaattaatctaatgaagatgagaggcaagacaattttgttgagaatttctacatcatcatagtaaagagaactgactggacagacagctgaaagtggagacgaggtctctcgaagtgtaacagctggaactgaattatggttacttattttaaaaagcaaacatactgaatggtatgactaggcttgttacactagtttaaaaataggccaagtgctggcactgcattttgctcgttctagtgttggtcatttaaaatagtgat

SEQ ID NO: 641 - DNA, 410 bp, Bos taurus
  Clone ID: 08-LIB188-006-Q1-E1-B7
atcatacctgtgtcctcctgcaactgtggtttagaactgcacactcatagtagtatatatatatctcgtgcctgtcttcacaaaccattctttcctccttttgatactcaccacccccaggcctgggctatggatggacatgtgacattgcacatccttgatagttggacgacacagggaacagggctccagtgaccgctggggccgccagtcaaaatccgtttgcctgtctccacggggaatcaggtggccgccattcccttgatacttttgagcccctgtggggggcggggggcgatggggaaccctcacctaagacaccgacaggagcccaacttggggggcgctgtgaccagcgtaccaaaggggaaaaatccaacaaggagacacagacacacccaacctctctg

SEQ ID NO: 642 - DNA, 430 bp, Bos taurus
  Clone ID: 08-LIB188-008-Q1-E1-B11
catgtaccctaccgccatgggcccgggatactgataatgtagcatttgatatggaaaggctcaccagaacccaagcggttaaccgaagatcggccctaggtgagctcgccagcgacaactcccttggccttgagccacttcgcacttcggggatctcgcctcttcctcaggatggcgagctcactcctcgaacaggagagatcaacatcgcagtaacaagtaaaagaatggtttattattgccagttttggcctcctcagtgccctcacactctgctacatgatcatcagagccacagctagcttgaatgctaatgaggtagaatggttttgaagaaagaaaaacactgctttctgactgattgccttgaaggaaaaaagaacctatttttgtgcatcatttaccaatcatgccacacaggcatttattt

SEQ ID NO: 643 - DNA, 317 bp, Bos taurus
  Clone ID: 08-LIB188-008-Q1-E1-B7
gccatgggggcgggatactgtgtcaaacagctgttggaagatttaatagtgaagtatctgcctgatgagctgtctgagagaaaaaaaatatatgatgaagaaactgctgaactctcacacttgaccaagaatgttccaatatttgtttgcactatggcctatcccactgtgccttgccctcttcatgtatttgagccaagatacagattgatgattcgaagaagtatacagactggaactaaacagtttgggatgtgcgtcagtgatacacagaatagttttgcagactatggttgtatgttacaaattagaaatgt

SEQ ID NO: 644 - DNA, 398 bp, Bos taurus
  Clone ID: 08-LIB188-010-Q1-E1-B11
acatacacggtggatatttgatacacagaacatgaagatttggggtgggcgttctgtgggttagatgtggagcccacatatttaatatcactattttaaatgaccaacactagaacgagcaaaatgcagtgccagcacttggcctatttttaaactagtgtaacaagcctagtcataccattcagtatgtttgctttttaaaataagtaaccataattcagttccagctgttacacttcgagagacctcgtctccactttcagctgtctgtccagtcagttctctttactatgatgatgtagaaattctcaacaaaattgtcttgcctctcatcttcattagattaattccaaaatcattctacccacaattatcttgaagggatgaagaatttgcct

SEQ ID NO: 645 - DNA, 421 bp, Bos taurus
  Clone ID: 08-LIB188-013-Q1-E1-B7
acattatttgtggattctatcaagcaatctctataccatatcctcctaagagcaagttctttttagagaataaatacccttgacacagcatgcctagaaaagagccagtctctggttcttacttcccttcccttttctctcttccccctccccctcattccctcggaagagctccttccttaaaccctaaccccttttgtaagcagtctttgaaaccgacaacttcaggggtgtttgttctctttataaaattgttagcatttcctgggacttctctgtttcttcatagagagttctccggttttgattttttttcccccagatgaccctttttattcattggtttgtgttaggggcaagtcagttcgctggggataggaaaatgttgaaaaacacagcatataaaacaaaagctaaataa

SEQ ID NO: 646 - DNA, 394 bp, Bos taurus
  Clone ID: 08-LIB188-020-Q1-E1-B11
actttagcacaaaatggtattactgtatttccaccagcacctgcctcctctgattcagtctatgccagcccctgaccagaaaccccaatgggtgggcttaaaagccatcaggggaggagtctgggcaaaggggcctcacgtgggcctgggaagacagcatagagtgggcagacacactgaaggagggataaagatgctatagccagacagacagcttcttcccaagggacaccaggcacgatgctgaagggtccacctaaagaagcaaggcggcgccatgtgggtctgaacctgacacatgtccctggtggcaagaggggtctgtcacagggtcctgggctattgacctctccagaccgtctcctagttccttctgtcttcacggggctcccct

SEQ ID NO: 647 - DNA, 338 bp, Bos taurus
  Clone ID: 08-LIB188-022-Q1-E1-B7
catggcggcgggatacaagtggtatgtgcacttctggtgagaattccttgcaccactctcaagtcagctgattccagggacacgccggggcacaggaggcactaggctcgtctggaacggctctttctggcagtgacattttgatttgaaacccaaagtaaatccatacgtggcatcatggttattaaaataatgaaatattactagccaaaggtaactgcaattcaatcaatgttatattttcacacacagaaatttagaaaaatcaagagtatgataataaaaaccataaaattaaacagaagaaaatcaatttctacaagaaatcatatatatgt

SEQ ID NO: 648 - DNA, 438 bp, Bos taurus
  unsure (430): Clone ID: 08-LIB188-023-Q1-E1-B7
ccatggccgccggatacacccccacaatcatacctgtgtcctcctgcaactgtggtttagaactgcacactcatagtagtatatatatatctcgtgcctgtcttcacaaaccattctttcctccttttgatactcaccacccccaggcctgggctatggatggacatgtgacattgcacatccttgatagtcggacgacacagggaacagggctccagtgaccgctggggccgccagtcaaaatccgtttgcctgtctccatggggaatcaggtggccgccattcccttgatacttttgagcccctgtggggggcggggggcgatggggaaccctcacctaagacaccgacaggagcccaacttggggggcgctgtgaccagcgtacaacaggcagcaggccatgtatttcccatggcgagggtcacatnttcacatc

SEQ ID NO: 649 - DNA, 441 bp, Bos taurus
  Clone ID: 08-LIB188-025-Q1-E1-B7
ggatacatttaaatagatcatgttatacacgtgagtcccagagaagcaggaaactgcagcaggaagcaacaagcacacagaaacacacctgtgtgtgcaccacacacactgaagcaatgcaaggcgattcctttgactatggcatactagcaatttccatcccccgaccccacactccaggaaaaaaaattttaaagaaacttcccttttaagaacagggccagccaatgattgttgccctagtgaccaggaaaacaagaacaaacccaggctaacatcaccttgaaggctggcagtggccattttcttttcttcccagcaaaggcaggagatactattttttaacattgaagctggggggccatatccttgtccctcacaaatacttgagacagttgtcttcaagaccctgtggttcattgccgcaaagactctgcaaag

SEQ ID NO: 650 - DNA, 418 bp, Bos taurus
  Clone ID: 09-LIB188-003-Q1-E1-C1
cacggacgcctaggccgccggatacattttggactgaaatggtccctctgctgaaatgccaggtgctagctgtaattcaggctttaaaacccaaaccccaaatgtttaataaataaaaattagaactagttgccattctactccaaaccagctagcctagggaaagaggccagagaaaggaggcagtaagatcttggacctgtgactacagggacagctggcagagaagtaacagaagactgtctgagcagtccacattgtggcccccactttttggcagaggtaggataagggtcacgtgcacccacctacactcatttcatttggatcttagaagggaaaaagttaaaagtcagctcagctttggtttctggtccaagttagggagattagaaaggtgagccttggtccaactttg

SEQ ID NO: 651 - DNA, 395 bp, Bos taurus
  unsure (97),(148),(188): unsure at all n locations; Clone ID: 09-LIB188-004-Q1-E1-C1
gccgccggatccttatgaaatataaaaagcccatagtgtgcaaagcaaaaacagtcctgctcatttcagctctgtcaaggttaacaaacttctacanactccctctacctgggaatagtatttaacttctgtttctgctctaattacngatacactaacggaagcaaccagcttggttcctcaagtanagttccttgtccggactatcttagttttttctttttaactttttgctagctcttttgccttcgaaatatgctgattgagggtgaaatcaactttgaaactggcattcacgaaagtgatcttttggccagtctggtggtggaaggtggaattttaccttctgcaaagaaacactatttacagaagggttttttatttcactgtgggtt

SEQ ID NO: 652 - DNA, 271 bp, Bos taurus
  Clone ID: 09-LIB188-007-Q1-E1-C9
gggcgcgggactacagagaggccccaggcagcttcagagaaccaggtgactgccggggggcctgctgtctaccacacaagccctgaggaagccttgaacagatgctgctctcaactggcctcagtgcttgacttggctcactctccacttcctccccacctctgacccagaagaccatcatatatatgctatcaaaagaaggggttgaagcaggggagagaaaccccctctaccttcctgtgttgaaaggtgccacgggttgccaaaaagt

SEQ ID NO: 653 - DNA, 373 bp, Bos taurus
  Clone ID: 09-LIB188-011-Q1-E1-C9
acatctgtatcttttaatactggggctcaagtgatggctacagcgatcataggcttccagttgtttccgactaaccgtcaaccgcccagaaggtctagcatggctcatagaagccctcaacttgtcgtcagggaatatcacccttatacacccatctcttccatcacaccctctcacatcttcacgcgcattcaacaggatatccctatctctaaccaaactacttactcgctaatttgggttcccctttactaaaatggcattttctccctaaacataaaccacacatttatctgcacatccatatccagaatttttgtgtttatacatttaagtatgaatgtagtacactgctttgagtcatatatagtag

SEQ ID NO: 654 - DNA, 215 bp, Bos taurus
  Clone ID: 09-LIB188-017-Q1-E1-C1
gacaccacgtaagagatcaccatggtgaaccagccaaacatggtgaccagcatggcgtagtcagtcgtttttttagggaggttacaaaggtcggcgtcattggcagcgttgaggaacggcctcccagcatgttcatccagcacggaggtcttgcagatcacattgtgggctgtctcgtgattggacaccatgctccgcaggacttgctggagcgt

SEQ ID NO: 655 - DNA, 430 bp, Bos taurus
  Clone ID: 09-LIB188-018-Q1-E1-C1
cgccaaggccgcgggatactcaatacaattaagtctcacattttagattaactacttagtataaatgtgaatgcacatcctcataactggcagactagatgacatatatttaatcacttatgtgaccatacagaattttagatgcaacaggagcttcaatactatagaatctgaccttagaaactagcttacatataaaacatagttactttgttcatctgtcgtaatctagaacagtgttgcaccaatgcttaagatgttattaaaacatatgagttctcaagacaaggttaacagacctgaagctccaccctacagatacgcacccataatttgaaaattgttttaccacaaatagcttatgagcaactcttaccacagtagttcaagcggacgctcgggcaggtccgggacccgtgtctactcctgt

SEQ ID NO: 656 - DNA, 421 bp, Bos taurus
  Clone ID: 10-LIB188-002-Q1-E1-C5
acattttatcataacattttgaacaaggtttatattgactcaagtttataaacaaagtgtgactgaaaaatttttacagagtctagtgcaccaatgctgatgtgaggggttgtgtatgcgagtgaggaaaaaatgtgtattctggtggcctgaaactttactggacaaggatgtgtgaacgtgcagagatatatttagtgacacagtgtagtagaggcaaaaagaaatatcaagtaaaaattccaaatgtatattttttcttattgcccttcacttggcccccaaattatcacttcctgttactatattacccttgttattaggaactctaagccatgcggagcaccactcctcttcccccgtcaacctagatgccgcccacggttcaatgccctcttgcagtgaccgtcaactccagcta

SEQ ID NO: 657 - DNA, 450 bp, Bos taurus
  Clone ID: 10-LIB188-004-Q1-E1-C5
ccatggggcggatacccactggagctctatcccgccttctttggctattacttcttcaatttcatgatgggagtgctacagctgctgcatatcttctgggcctacctcattttgcgcatggcccacaagttcataactggaaaggtagtagaagatgaacgcagtgaccgggaagaaacagagagctcagagggggaggaggctgcagctgggggaggagcaaagaaccggcccctggccaatggccaccccatcctcaacaacaaccatcgtaagaatgactgaaccattgtccctgctgcccctcagattaacgtataaagccaaggaaataccccaccctccccacagggtcactttaagctctggggagaaggagaaagcgagaggagcgtgttcttctctgtgccccaccccctgctactgtcacccagttgcctttaaaccaaa

SEQ ID NO: 658 - DNA, 295 bp, Bos taurus
  Clone ID: 10-LIB188-017-Q1-E1-C5
gccatggcggcgggataccagcagtaattaggtcatgaggttgtcctgaggagcgttagagctcatacacgtaaagcactttgtaggtgataggactcaacagtacctttctatattctaaggttatgaaatacagtagactttcaaatataatatggttacacttatgaatatgctgtgcacccttaggcaggttgctttaattctctcagtcacaatggtcatctgtttcacgcagctccaagtatgtagccacctgagatttgtcgcaattagttgattttacacatgtaag

SEQ ID NO: 659 - DNA, 413 bp, Bos taurus
  Clone ID: 10-LIB188-019-Q1-E1-C5
acagtgatcaatctcagatcacggtctttttcagcttttaattagttttccagggactggttctagcttgaagtcctatgaaatatgtggcttgagtagaatctgttggaagagagggtgcgagtgaggcttatgaagtcagacgaggtatatgtccatgacagattctgtccaaactagctgttccattatttctattttcttcctcattcaaaatgattcagtctgaactctgctgtttctctcctcacctaactgatgaaatgtcagtgcctttgggagctaaattaatttttttccttcctcctgtgtctctgcatctcgtgtccagtaactgttccgccgtcttgaattttaactttatttattttatttatggctgtgctgggtcttcattgccttgagcgcacttt

SEQ ID NO: 660 - DNA, 309 bp, Bos taurus
  Clone ID: 10-LIB188-027-Q1-E1-C5
acacgccaatgctgttcgccagggtgaggagctacaccgcattctccgagaggccgctgtagccctcacgtccgcccccactgcgttgcatgagtaaaagtatatagagaagcagagcaacctaagttataaatgtatatatatatatgatatatatatatggaattggaacttattttacattgtcggagttctttcaagaagagtattaaattgattatttttttatttaaagggaaagttgattcttggggtgtttgttttgaaattaagttgaaattattttaagtttcaggacacttatgttgt

SEQ ID NO: 661 - DNA, 411 bp, Bos taurus
  Clone ID: 11-LIB188-002-Q1-E1-C3
tttcaaatattgaacattcagatattcagatatgaatattcagacattcagatatcacgtattattcaacaagaatttaatttcagggaacgtgaggggaaggggatggaacgtgcagaggggcatgtctgtcgagcgctacggccaaccatggacctgggccgtctgcattcaaggcactggcttctacagcatctggactgaacgcaggagaggggggagctctgcagcgaacagtctagctattcagagcgcccttttatttgcaatttaagagcaacgcatggatccaaagataagcgtgacttgctaatgtgaagtcctccctaggagcatcaccaccaatgctccattgccactgccctgttggaaacaaggttcttaaggaaaagtaggattctctagagaaga

SEQ ID NO: 662 - DNA, 313 bp, Bos taurus
  unsure (300): Clone ID: 11-LIB188-003-Q1-E1-C11
cacctccacgctgatgttggtgagccgcatcaccatggtcgccagcaccatgcaggaataggtgatgaagaggacgtggaatggtcctccgagtatggtctgtccgaagacgcgactgagccccactcggaaaatgtctgtaatctctatgaacaggatgatgacagctccaaagatgctcaacagctcccccaacaatcggaggtggtcctggtgggtcacataagcctcctgaagtggcttctgctcccaaatggtgttgtcccgggggtcagtttcattgtcagtcctgggcttganggggcggtatcac

SEQ ID NO: 663 - DNA, 321 bp, Bos taurus
  Clone ID: 11-LIB188-005-Q1-E1-C3
ggcggcgggatacagtgatcaatctcacatcaccgtcgttttcatcattgaagcaattctcaagggactggttcgagcgtgaattcctagcaaatatgtggcatgcctacaatctgtcggcatcgaaggtgccactgcggactcacaagtcagcctaggtatctgtccacggcataatccgtctaaacgatccgacctactatttcgagtttcctccgcagtcaacacgactcactccaaactctgctgatgctctcttcacctaactgacgaaccgtaagtgcctttgagatccaactgaagttttttccttcctcctgt

SEQ ID NO: 664 - DNA, 400 bp, Bos taurus
  Clone ID: 11-LIB188-007-Q1-E1-C11
gggcccgggatactttgggatatatggaagtatagaacagaaaagggaacaaaaccagtaacattaaaacacaatgccttcccgctctcctacttcccaaagcactgtaagctagagtgatcagaacaatggctggggaggggcgtgaggcgtctacactgaaggcgagttgttttcacagctctgcagcctcttagtgccgtgcaacaacctggcaaatataaaaggatccaggattactaaaggtcagagacaagaactcctcttttccccgaactaggactggcagtagacactgtttaaataggctttccctctgaggaggggcatcacagcagtgcctctgccagccgccaggcgactgacccactttagcttccaaggtggcatcttagacata

SEQ ID NO: 665 - DNA, 445 bp, Bos taurus
  Clone ID: 11-LIB188-013-Q1-E1-C11
ggccgcgggatacacccccagtacctggcacaatgcttggttgaagctgcaaatgctaatgcaatggctactgctttgcgctgaaccaggcagatacacctatcttcctttggtccgattttcattccctgttaaccacaacctgagctacagtcctggctcttggtccttgaccttaagttgaaaaaattaagcaagatatgcacatactttctataccagcctttctgacaggatcctcaaaactgaatcatcatgggctatgaatcttctcttttgtggtataattcttatttcttggataatatcagtatgcaaaggtaattcattttcagtgcagtacttgtgtttaagtcatagaattcaggggcatatatctagctatattttttatactcctaaataattaaaagtaaaaattccataaacaaagagactcccacat

SEQ ID NO: 666 - DNA, 397 bp, Bos taurus
  Clone ID: 11-LIB188-013-Q1-E1-C3
actatccggggggatcgtgagcacagacgtagttggttaggtgttgtcctttgctttggagttgcttttcatgtgggattgtggtttcccaaccatcgattgcacccatagcccctgcattgaaagtgtggagtcgtaacccctggagtagcatcgaagtccctggagttgcatctaagctgtttaactacattctctgttaaatgcatctcttatgagtaacaggatactccctttaagtacttcctacagataagctcagcagtttcgcatagactgatgaaaaaggtagtcataattgtcattattgacatcatgtggggacctgtgtggcttgccaacccgagtctgggatcaagggctttgaatccatgtcagtgccgacggaattggggga

SEQ ID NO: 667 - DNA, 434 bp, Bos taurus
  Clone ID: 11-LIB188-017-Q1-E1-C3
gcggccggatccaggcctgatttgaaaaaggtgaaagaccattgccgaaggactccggcccgctattgcctttacactggcttggctttggctatgcagcactggttgcttccggcgggattattggctatgcaaaagcaggcattgttccatccctggctgccgggctcctcttcggtggtctcgccggcctggggtcctatcagctgtctcaggatccgaagaacatttggcttttcttagtcacatctggaaccttggctggcatcatggggatgagattctacaactctagaaaattcatgccagcaggcctgattgcaggtgccagtttgctgatggtcgtcaaacttggaatcagtgccttgagtaaaccccatcagtaatagtcatggcccagcttggactcctgaagaatttttaaaacttctact

SEQ ID NO: 668 - DNA, 303 bp, Bos taurus
  Clone ID: 11-LIB188-024-Q1-E1-C3
tcatgaccgcgggatacccttcccatcacacaaacaagcttctgaaacgacgtttagccgcatgctaagccgtgactcatcctttgactgcactcacctcctttactgtaaggatgcaattacatgcataggccgaggttatcgtatccaactctaatgtgcctgtcagggaaatggatgatatggatgacgcatggaagtctgacatgcatcgagtcacacaggctccaacgacaatggtgccattcctcagtcacaataccactgtgtctctgagtatcacccgagcacatgtcacatggg

SEQ ID NO: 669 - DNA, 301 bp, Bos taurus
  Clone ID: 11-LIB188-028-Q1-E1-C3
cgccatgggcgcgggataccagtaaccggtcctgaccgcaactggagaaacggaggttcggcacccatcgttctaccatgccacgctgtccgctcacccgctgcagtgaactgactgctgacatccaacctttcaccgatcctctcaacgacatggggcacactggtggggaagcacacggggccctgcctctcccactaaatagggtgtcctgatgcgcgcctgcttgttgctggtgcctcagccgatatgaagtcctctcagggcagactcctgcctgacagtgccaccttgttgcacc

SEQ ID NO: 670 - DNA, 436 bp, Bos taurus
  Clone ID: 12-LIB188-004-Q1-E1-C11
acagttggaattgaatgtccagattacagaggcaatcgtcttagttctcagcttcagcaagaggggtcagaaatgctatggaatttagcaaggaaggatatgaactcaaaacctgaattcctagaagctctctttttacttgagaccatgttgggtggtccccagtatgtcaaacaccatatgattttgcctcatacccgatcttctgatttagaggttcagcttgatgttaacatgaagccattaccatttaacagagaagccataccaattgaagatgtagccaagttaaggcttaagcatgtgggagtcagccttaccgatgatttgatgaatcagctactaaaagggaaatcaaaagggcattcccagggggaaattgagtcagacaatgggcagcagcccttgaaattagaggagacggctaaacctgtgg

SEQ ID NO: 671 - DNA, 427 bp, Bos taurus
  Clone ID: 12-LIB188-004-Q1-E1-C7
ccatggggcggataccactggagctctatcccgccttctttggctattacttcttcaatttcatgatgggagtgctacagctgctgcatatcttctgggcctacctcattttgcgcatggcccacaagttcataactggaaaggtagtagaagatgaacgcagtgaccgggaagaaacagagagctcatagggggacgaggctgcagctgggggaggagcaatgaaccggcccctggccaatggccaccccatcctcaacatcaaccatcgtaagaatgactgaaccattgtctctgctgcccctcagattaacgtataaagccaaggaaataccccaccctcaccacagggtcactttaagctctggggaaaaaggcaaagcgagaagagcgtgttcttctctgtgcccaacccctgctactgtca

SEQ ID NO: 672 - DNA, 407 bp, Bos taurus
  Clone ID: 12-LIB188-006-Q1-E1-C11
acaagttgagccacggaagcaggctggtggtgaagaacggctcacccagcaggagagaaacctttttaccctccaagtctgcaggtgttaataattcaggccgtttctctattatattaattttgtcttccaagtggttggccttgaagatcttagaaaacaaaagtgttggtttcattgagaaaaagaacacatctcagagttgctttatctgtgtgcagttctctggccaaacggttctggagcaccactttcagctactctgctgaacttctcccctccaagggcctcctacagactgcaggtgacatcatgagcaaaatgtcttaagagcaatagaaatttctcttgcaggcacactggcaaggctcagaagtaggcttgtagtcctggtggggtgggttatc

SEQ ID NO: 673 - DNA, 412 bp, Bos taurus
  Clone ID: 12-LIB188-010-Q1-E1-C11
acaccgagcagttacctctcagctcaggcagaggcccggtctcctaacactgctcctgctgggccagtggcacaatttccaagactgtgtttctgtgaagtagtgtaagatacagagttgaccagggaacccagctacacctggcaaagcaggcagaggggtgggggtccacctttaacaatattgccatgtcaacaaatacttttttgagatcgactttgtgcaaagtatactaataaactctaaccaattcagttacagatgtattatttctttctctaaaaccttcagtcagggcctatgtctggaaccctaaaagtaatacttttaattcttaagactggctttaaccaaatcaggtgcccaactccttcaaactggggtggacgatagataatgagagactgagttt

SEQ ID NO: 674 - DNA, 259 bp, Bos taurus
  Clone ID: 12-LIB188-010-Q1-E1-C7
acagacaaaagcagccttggaaacctgacacttgtaggatcggggtcagtcagccagcaggtaggtgacacaggtaggacctggagcccagacctagggcctcttctccactgagctttgccccaaacccctcagtgcttgattcattcaggccagctaggcttgagctccgtaagtcataaaattaacttaaatctgatacattggagaagaggaaccatgattaattaccatcctgtttgtggagaagaaacaatgt

SEQ ID NO: 675 - DNA, 421 bp, Bos taurus
  unsure (299),(334): unsure at all n locations; Clone ID: 12-LIB188-011-Q1-E1-C7
acacacggagaactctgggaaatggtttgttcctcagactggaaatgccacaacctgagcttacactcaccgcggtccctggtatgttttctcgtcaccctcatgacttcagagacttcagacttgtggtcctttctctgttactagttctacacacctcacgctacttccttcctcttaagaggaatttcttgaatttcttaggactttctcattttgaaagagtgtagcttcatattgcttattattgggtccttttgttcgctttttaactcgactcacagtctgtcttcccctgnagggcatgcatttcagtattatagaaatgcagtanacggtaataaattatttacaagcacctagttcgtttaatcttacgtgaaggccatttgcttttggaaaacaaggagaaataatcttt

SEQ ID NO: 676 - DNA, 322 bp, Bos taurus
  Clone ID: 12-LIB188-012-Q1-E1-C11
acctactatgcgccatcacaggacccagcactggacgggccaaatacacgtctacaaatctgtccacctcctgctctgagccacgagctgcccgcaggcttgtcttttgacccagttcccgtccctgtgtccagaacacaagccacgctgaccaggagttgtagatggctgaagaagtcttgctacacttcggggagcattgccccaggtaactaaatcccagaagactcccaagctgaaagccggctagacaaaggtgtttgtcctgacttggaaacagccagatttctctggtggcaccagatcacaacaaagggggcat

SEQ ID NO: 677 - DNA, 148 bp, Bos taurus
  Clone ID: 12-LIB188-014-Q1-E1-C11
acggggacacagcacagtccaactcagctctgaaaggtaatacatgcctgtcatggaagtgagccagcggtggccttgcaaccgtggagcctgagttccgctctgaaatctgtatttcagatttcaggtataaccatttgttaactgt

SEQ ID NO: 678 - DNA, 205 bp, Bos taurus
  Clone ID: 12-LIB188-014-Q1-E1-C7
acagtggtcccagagcctgccggagccggggctggagctagagctgcagccggagctgaagcaggagttcgatttgctggcagcacaggaggtggaggtcgggctgggggctggggcttagtaggctgtaagaaaaagtcggcactgactacaacacatgtcagctttctgtcaaattgctatcaattaaaatgaatgagagcgt

SEQ ID NO: 679 - DNA, 413 bp, Bos taurus
  unsure (394): Clone ID: 12-LIB188-016-Q1-E1-C11
accagagaggccccaggcagcttcagagaaccaggtgactgccggggggcctgctgtctaccacacaagccctgaggaagccttgaacagatgctgctctcaactggcctcagtgcttgacttggctcactctccacttcctccccacctctgacccagaagaccatcatatatatgctatcaaaagaaggggttgaagcaggggagagaaaccccctctaccttcctgtgttgaaaggtgccacgggttgccaaaaagtacaaacgctacagaacaaggggagcagacacgcgtagggtaagaggggctcggtgggagaacgtcacggggcagatggtgcactggggccaagagagcagcacacaggccatatctagagggcaggcggggtangaaggggtttaaaaacgag

SEQ ID NO: 680 - DNA, 306 bp, Bos taurus
  Clone ID: 12-LIB188-022-Q1-E1-C7
acacagtgaaaagttgcttttcttctctttctaccaaaaccaagtttcaggaaaatagctctgtgctctttgtttttagtgatgcccttcttctgtcctgtgagttgtatctctcctttatccggtgctgctaagccttccagggtatctttccaaccccactggtgttccatggtcagaggcggtagggctgagacaccacggggactgccacccacccagctctgcttggccaggcagcaccaacaccgtcctttcccaggaagaacaaagacgctgcacctgtcctcccatcagccacactgt

SEQ ID NO: 681 - DNA, 448 bp, Bos taurus
  Clone ID: 12-LIB188-023-Q1-E1-C11
catgatcccgtgcgcgatggcggcgggataccactgtaaggtcactatgccccctgtgaagtccagacagaaactgccctcccaagtaaacactgcttctttaaagcagacactaacccctcctagatgccatgcataggtaagagattgggtttcgcagattaataaatagctgcccgtgtgcatatagtccagagacatgctaagacgggtaagttctgacccagagagacaagcactggctctcctgtctggaggggaatataaggggctgagggccgtggcttcaaacagccaagatactgataccccataaagtctccaagatgaaaacggaaaaggactgtttctggaatattgctgccaatacaataagcaccttacaccacgtgccttgatgcaaagcaaggactggctgagcgaaagcctctggggtaaagcccataca

SEQ ID NO: 682 - DNA, 426 bp, Bos taurus
  Clone ID: 13-LIB188-004-Q1-E1-D1
gccgccggatccgctggtcacagcgccccccaagttgggctcctgtcggtgtcctaaggtaagggtccccaaccgcccccggcccccaaaaggggcccaaaattaccaaggaaatggcggcaacctgattccccatggaaacaggcaaacggattttgactggcggccccagcggtcactggagccctgttccctgtgtcgtccaactatcaaggatgtgcaatgtcacatgtccatccatagcccaggcctgggggtggtgagtatcaaaaggaggaaagaatggtttgtgaagacaggcacgagatatatatatactactatgagtgtgcagttctaaaccacagttgcaggaggacacaggtatgattgtgggggagtaccccgtctctagctcctctccccaacacaatcacagcagtcaga

SEQ ID NO: 683 - DNA, 401 bp, Bos taurus
  Clone ID: 13-LIB188-005-Q1-E1-D1
cttttgcaacttcagcatatttattgggtttgtttgtttgattaaatcagttctacagtggatttaagggtttttcctctgtagctcaaaggtggaaggcgtttattttattagctaaccaaatatcattgagaggaatttgaactactgttactaccaaagatttttattaataaaggcttctattttggtaacacttctctatatttttacttacaggaatgttactgttggaaattatcattttaaaaaacttgtaaaaacaaacctccatagctgataggaatggtctcaacttgcagccccattatactaacgatgatctgaagtttctcaagcacgcagagaaacgtaagagaaacgtttcagcaaatggatgggcgaaaacacgaacatgtttg

SEQ ID NO: 684 - DNA, 311 bp, Bos taurus
  Clone ID: 13-LIB188-007-Q1-E1-D1
gccatgggcgcgggatcaccagatcagagctatcctcctgcctcctgcctcccaccaaagtccagatctctcacctgccaggtcaggggtggggtggttggggtttagaacagaatacagggaaaccgaggagcaggctcacacctcgccccaagcacagggcccagcgcgaatagggaccctgcttcacccaccctggccttaccgccctgtctgagcaaagcactttacaaaaggccgggatgccaccttgggcaccagcctccatccagggtcacagctgcagacagccgcagaggttcgggaggtgt

SEQ ID NO: 685 - DNA, 277 bp, Bos taurus
  Clone ID: 13-LIB188-010-Q1-E1-D1
cgggatactgcgccccgttttcctacagattcccaactgaagtgaccgaaagctctccagacacctctccccaggaaactgggattaaagagaactgggagcaagctgcctacccttaactctgccaaccacacaccaaggaagatgctggcaggcaaagcccgtgtctggatttccagtttgggaaaacacagcgtggaggtcacccttctcagagctggctctctctctttcccagactctggctcccctcactgtcgaagcctttactatgagt

SEQ ID NO: 686 - DNA, 392 bp, Bos taurus
  Clone ID: 13-LIB188-011-Q1-E1-D1
gccatgggcgcgggatacattttggtctgaagtggtccctctgctgaaatgccaggtgctagctgtaattcaggctttaaaacccaaaccccaaatgtttaataaataaaaattagaactagttgccattctactccaaaccagctagcctagggaaagaggccagagaaaggaggcagtaagatcttggacctgtgactacagggacagctggcagagaagtaacagaagactgtctgagcagtccacattgtggcccccactttttggcagaggtaggataagggtcacgtgcacccacctacactcagttcatttggatcttagaagggaaaaagttaaaagtcagctcagctttggtttctggcccaagttagggagattagaaaggt

SEQ ID NO: 687 - DNA, 54 bp, Bos taurus
  Clone ID: 13-LIB188-016-Q1-E1-D1
ccatagccgccggatacctggtgaaaaaggcagtcggatccgggaattgactgc

SEQ ID NO: 688 - DNA, 259 bp, Bos taurus
  Clone ID: 13-LIB188-017-Q1-E1-D1
acatgaatcatcggtcatccacaatgcagggtgtggcaaatatcaaccaccaggtggagatgaaagaggtcccgcacaactggacgtgcgactgcgtaatgaggctcaccagccaggggtacgccccttggtctgaattcgtacctacgaagatcctgagaagcctgcagaaggaccggagtgcagaatggaagtctttcccagccaaggaattattgaagtctgcgatcctgtcagagtgggggttgcactagtccac

SEQ ID NO: 689 - DNA, 233 bp, Bos taurus
  Clone ID: 13-LIB188-019-Q1-E1-D9
gggacacgctggtaacagcgccccccaagttgggctcctgtcggtgtcttaggtgagggttccccatcgctccccgccccccacacgggctcagaagtatcaagggaatggctgccacctgagtccccatttcaacaggcaaacggtttttgactggcggccccagttgtcacttgaaccctgttccctgtttcggcccactgaacaggttgtgcattgtcacatatctatcc

SEQ ID NO: 690 - DNA, 248 bp, Bos taurus
  Clone ID: 13-LIB188-021-Q1-E1-D1
gggacacttcccgatactgagccgcacaacacttctagatccaggccatagaggaaaaggcaacaaatacacatctcagtctagaaacacacacacacacaaacctgatattacacattcaatcaaatccaaaaaggcttttctgggtttggcgttttggttttgattttggtggcaagcatcaaacggagaactcctaacctccggctaacgttcacattatcaaaaaaaccctgttataaaaacgg

SEQ ID NO: 691 - DNA, 401 bp, Bos taurus
  Clone ID: 13-LIB188-024-Q1-E1-D1
ccatggacgccggatactggctaggaaaactttattgtgctccatgtatccagggagctcacacatgcacacgcacatccacacaggcacacacagctaatactgcttacggcactggccacaggcccagagtggccctagagttgagaagaggcccagaattctgctttggtgcctcctcactgtagtctcctgcactgcgggctgtggcccagataggggtcccggaggcagcaccttcacacttccaggccaggacccttgctcagtccaagtgcctgcaccagatcctctcccagcccgctcttcagcgtccgtctcaaagacttgcggttgccacgggaacgcttgcgttccctagcagctaaggcacgggggctgctcttggtcactgactgcgc

SEQ ID NO: 692 - DNA, 414 bp, Bos taurus
  Clone ID: 13-LIB188-025-Q1-E1-D9
gcaatgggcccgggacactttgcacgaggattccagatgctgggccccttcaccatcatgatccagaagatgatttttggcgatctgatgagattctgctggctgatggccgtggtcatcctgggctttgcctcggccttctttatcatcttccagacagaggaccccaatgagctgggccatttctacagttaccccatggcactgttcagcacctttgagctgttcctcaccatcatcgacggcccccccaactacgacgtggatctgcccttcatgtacaagttgtgccacggaagcaggctggtggtgaagaacggctcacccagcaggagagaaacctttttaccctccaagtctgcaggtgttaataattcaggccgtttctctattatattaattttgtcttccaag

SEQ ID NO: 693 - DNA, 440 bp, Bos taurus
  Clone ID: 14-LIB188-002-Q1-E1-D9
cgccatgggcgcgggatactgaaagagtcacctttctctccaaacccctagcaattaatccaagtccacagcttcagaaagccaggagttttgtctcttcagtctgctcctctggttacacatctttctttcaaggaagggaggtcaaaatatttcaaacagggaacaaaaccacagtggagcttccagctcaggtttctaagatggagcaagggaagaaccccactgacttcaaagaaatggacaaggttgagatggattacttctttacagccttgtggagggaagaaacactgtcctgtagaacaaaactgactacaaagatttacaaatgaggatccaattgacagatgagaatccattggtaaatgcaggctccagctcctaaaaacgggaggggcctggctcgacagcctggatcataaaaggaatctgccaca

SEQ ID NO: 694 - DNA, 135 bp, Bos taurus
  Clone ID: 14-LIB188-004-Q1-E1-D5
ggatacagaccacaatggtctcctagcctcctctctggggcctggtttcaggcccccataggacagtgactcttgtccacgtgtggtcactccctgcctgtgcaggggctccatacaccggctgtctagagcctc

SEQ ID NO: 695 - DNA, 298 bp, Bos taurus
  Clone ID: 14-LIB188-004-Q1-E1-D9
acttgatcagatcaggatgatgcaagcacctcgaaggaccagtggctaatgtcgtccctaccacatgggttcctggcatggtgaaatgcctatgccccaggctgtgacatttctttaccgcgtacgtggacacttcgtggttcagctccaccagggatctattgttcgcttagtctgattccttcaattgtccgtcagactgagctgtatactccgattttgattagttcaaaccacattgtgtgatcaattcacagctactgctgctacggatgattctgatgctcccggcatgtcc

SEQ ID NO: 696 - DNA, 369 bp, Bos taurus
  Clone ID: 14-LIB188-006-Q1-E1-D5
gggatacaagaaaattacaatgtgaaaaatatacaagtgaaaaacgaggccaaaaacctgggtgtggggaggggccacttggtcacaaacacaaataaacatttctgagttcttcctttggtctgactacagccccctctccccaggagagggggtgcagagctgggacctggagatcagaccccagtcccagccctgtcccccaaaataggcagggttggggggcaggcacatctggagcagctggcgctatctggctcgctctggctttgggatggtggggagaacgtggagatgagggagccccttccttttccgagacccctggctgagtgggctgggagcgctgggggtgtgtggggttggcaa

SEQ ID NO: 697 - DNA, 425 bp, Bos taurus
  Clone ID: 14-LIB188-010-Q1-E1-D9
actgtgaagactaataacaaagttagccataaagtaggactttataaaacataaacagaacaggtgccgtctcgtccacagaacagttccagtctcagtgtgcagtatgtaattaagccctattaccttcattcttttgcatagaaaactttgaaactgtgtatccccaaattaaaaaatatatattactagcaaagtaagattgtagtagtttgatcttgtacagacaaaagcagccttggaaacctgacacttgtaggatcggggtcagtcagccagcaggtaggtgacacaggtaggacctggagcccagacctagggcctcttctccactgagctttgccccaaacccctcagtgcttgattcattcagaccagctaggcttgagctccgtaagtcataaaattaacttaaatctgataca

SEQ ID NO: 698 - DNA, 393 bp, Bos taurus
  Clone ID: 14-LIB188-022-Q1-E1-D9
acatctcttacaactaatatgatattccctttaggtatttacaatagagaactcagcagtttctcatagactgatgaaaaaagtgagtgataattgtcattattgaaatcatgtggggacctgtggggcttgccttcctgagtctgggatcgattgctttgaatcagtgtcagtgccgagggaattgggggaagtagtagctgccagtaactctactttgtgttttgtggctgaagaagtataggcttttctcctcacttcacttaaaactaaaaaaccaaaactccttgcagtaatagaactaaagttttgtttctgggacaccagcacccggggagtcactgctcacaagctgtcctgactgcttggttctgtgatggtgtttcacatcct

SEQ ID NO: 699 - DNA, 415 bp, Bos taurus
  Clone ID: 14-LIB188-026-Q1-E1-D9
gggataagtgtgacggctgaaccgaagtgatagcgacagctccaccctgtccaagaagccaccttttgttcgaaattccttggagcgacgcagcgtccggatgaagcggccttcatccgtcaaatccctgcgcgctgaacgcctgccgcgcacctcgctggacctcgagttggacctgcaggccaccaggacctggcacagccagctgactcaggagatctcggtgctgaaggagctcaaggagcagctggaacaagccaagagccacggggagaaggagctgccacagtgggtgcgggaggacgagcgcttccgcctgctgctgaggatgctggagaagcggatggaccgagcagagcacaagggagagcttcagacagacaagatgatgaggtcagccgccaaggacgtgcac

SEQ ID NO: 700 - DNA, 420 bp, Bos taurus
  Clone ID: 14-LIB188-028-Q1-E1-D5
accttatgccactatctgctgaccccgagacctctcctgtccaaccacactgatgaggtaaagccaccgagcaagcctgggccagctgcaggctctgcctcgtgtcccctgagccctccactcctagggcactgggaccatccctccacagaccccggcctggatttctggcccctgggagtgcaggaggcccatgtgaaggctgagcccctgcctgcaccttgggctgggaattacgctgctgcccctctgcccttctctgagcactggctccctaggaagggacctaggctgtgggctgccgtggggctcaccctcggcaccccagtcagtagcctcttcaacagctacccagcttttccaggatagatcgggtggccaccaagaggatttgcacgatggcccttactccttcagccc

SEQ ID NO: 701 - DNA, 417 bp, Bos taurus
  Clone ID: 15-LIB188-005-Q1-E1-D3
aatggcggcgggatacttgtaaaaaagtatgtaaaaatggtattccctatttataggaaatgtttacagaaaaaatatagctagagggatcaaactagagttgatgtgaaggccatacatttttatttttccattctcctctttaaaccttccctaacactgcaaccacataaagttgaattttagaactggtagaatttctaagtgtggctcctaactggcagcatcacataggaacataacagaaatgcagtctttcgtatgctgctccacacctgcaacattctaggggtgaggccagccacgttttaacaagccttccagtaacactggcgcagcacttggccttccttcagcctgtgcataatctttaccagtctcttctgtaaaaatttcacttgagtagcctcctggaat

SEQ ID NO: 702 - DNA, 425 bp, Bos taurus
  Clone ID: 15-LIB188-013-Q1-E1-D3
acgctggtcacagcgccccccaagttgggctcctgtcggtgtcttaggtgaggggttcccatcgccccccgccccccacaggggctcaaaagtatcaagggaatggcggccacctgattccccatggagacaggcaaacggattttgactggcggccccagcggtcactggagccctgttccctgtgtcgtccgactatcaaggatgtgcaatgtcacatgtccatccatagcccaggcctgggggtggtgagtatcaaaaggaggaaagaatggtttgtgaagacaggcacgagatatatatatactactatgagtgtgcagttctaaaccacagttgcaggaggacacaggtatgattgtgggggaagttcgagcggcgccccggccaggtgtacaagctttttttttttttttttttttttt

SEQ ID NO: 703 - DNA, 409 bp, Bos taurus
  unsure (73): Clone ID: 15-LIB188-018-Q1-E1-D3
ccggatacaataaagacgcctcagcagcttaagcctctcatagacccgagacccctgacagaaagctatgcanagcatctctcctgcaaattacgcgggtttccagtattcccatgtacacgagccttcacagacaggcagtcaagcatatctttagaatataccaacttggctctggctgccttaagtaagcctgaagagtttaattcccatccaagtccaaaggtggaagaacacattaacaagtatggtaatcggcaagatcacactgtaaaagcacacactggtggtgccactgcaccccttagggaagtcgtcttctacagaggctgagtagaacattcctgcgaaaaataccaatggaatcaggacattcaccataggaagagacagaaacattcttctccac

SEQ ID NO: 704 - DNA, 382 bp, Bos taurus
  unsure (135): Clone ID: 15-LIB188-020-Q1-E1-D3
aactgcaacttctgaagttctcatgccctagagcctgtgatctacaacggatgaggccaccacaatgagaagcccaaacactgcaactagtgaaaagcccatgcagcaactaagactcagcacagccaaatatanatacatatttaagagaaagaaaaatcaaacaaaaggacggttaagttttaatttacatttcttgcttaaaaattttaagactttgggaccaatttcaagggtcaaaccaaaagggaattggtttcaaatggttttccttggcttttgatgattaaacaattttttaagaccctgaattgcctttctgaggaattaggggggtttgaattgagtaaataattaccccccttaattaggctgcatggtt

SEQ ID NO: 705 - DNA, 323 bp, Bos taurus
  unsure (285): Clone ID: 15-LIB188-021-Q1-E1-D3
ttttcaatgggtcctttttttttttttttgccctacctaaaatcaaattgagctgaatgggaattgacaagggtacggtaattaggattgatgtgtggtcctgacttgggaaacttgccgggcctctgcttcatttcactgggacatagtatttgacaactgctgggggtgaagatggcagtgggcccccaataccaagaccctccagtggctgttgttataaagccacactggtgtaatggctacacctccccctggaatgtttcacggctggttgaccctganggggaggcattacctttgtagaaaaagttgcagaaacg

SEQ ID NO: 706 - DNA, 389 bp, Bos taurus
  Clone ID: 15-LIB188-024-Q1-E1-D11
atggcttaggtcaaaactggaaaatgacaactcagatgtagtcattcttcttctcggttcaaacctttgataacttgctccttcagtgacctttccgggctgcgtttttatccgtgaagtggccgcatggcaataagccggtctccggctgtccccgttcgccctttcacgcagtatttgaggaaatgcatcattacaaagggtctctacctgaactctcagattctacgcctgtaattccaaaagctgcacatgtttacaaacgagctcatcccctccacgcaaacatgttgctccgtgaatcacatcagaaaatgtcatggccctgtgaaaacagggtggcaatctcagacctgcaaggtgctgtctggaatcaaacacatcatgtc

SEQ ID NO: 707 - DNA, 245 bp, Bos taurus
  Clone ID: 15-LIB188-024-Q1-E1-D3
ccatgaacgccggatgctcgcataaatgagtaacttcttattggggaagtacagtcattatagttagcgaaggcaagaccagagtgatgcaactcctcctcgccacatgagtccgttggacagttcagacgtgacgcatagactgtgtagccatctgtcccacgtagcttcttgacaatgggatctttggggacatttacatgacccacagcctcaacgagtgccttactggaccgtgtctccac

SEQ ID NO: 708 - DNA, 327 bp, Bos taurus
  Clone ID: 15-LIB188-025-Q1-E1-D3
gatacatattcagacgatgagatgaaaatcactggacggcacatcatgaattcaaaggtaaactcttgctggtgaaggacaccttcagtttagtccattttttccaagcagcacctgttcgaaaactcgaacacctaattcattgcgtgaaaatggccagccagccactttgcatgctacaggtctgggacgacatatcagacactgggcatctttcgttcagtcacaggatcaggggtgcatctatttaccattgatcaggtatagatgggatgctgtgccaaaggttggatataaggctggcactaagccatctgtaatgaatta

SEQ ID NO: 709 - DNA, 425 bp, Bos taurus
  Clone ID: 15-LIB188-028-Q1-E1-D11
gcatggccccagccgccataggcccgggatacctggtaaccatacactacagcccagagtgaagccaggtctgactgctcccagagtggggccccagcccatctgctcattgtcggggtgaccgctggatgcctgtggtcagaggaggccttgaagttccctctccacactcattgaacaccagccacatccagggccccagcctgggagagctgaaagacccaaggccaaggcttagccaagtgaaaacacttcaatggattcgaggtcctgtccgcttcctgttgtctctcttcctcttccccacttctggaactcaggatctgacacaaagatggagatgggatgacacccggctacgtgcatggggctgaaggagtaagggccatcgtgcaaaatcctcttgtggccaccagatctctcct

SEQ ID NO: 710 - DNA, 266 bp, Bos taurus
  Clone ID: 16-LIB188-006-Q1-E1-D11
gccatgggcccgggatacattacaatgggtgccagtgtcaaaacaactccctgcacttcacaagcagcatgactatattgtggcagcagcagataggacttcccccggtgggcagacagtgttcacacagtgcgactgcaactagagcacagaccgacagaatcacatcttgtttcctttgcttttctcatcagtgaatacacaagtgaagagatgggagggcaaagcaatggggatttgtggcgctcgggtgttgccgtgcgggt

SEQ ID NO: 711 - DNA, 210 bp, Bos taurus
  Clone ID: 16-LIB188-008-Q1-E1-D11
acctgctctgcaggcgtcggcccgaggcggtgacggtgtgacctcagtcttgcaggtcacctggcaagaaaggacctggacacttggatctgaagggggatttcaaaggaatcagttttcagaaatttcatgcttactccagcacatagttttaaaataaagtttaccactttaaaacatccctaaaaaaaaaaaaaaaaaaaagcttgt

SEQ ID NO: 712 - DNA, 405 bp, Bos taurus
  Clone ID: 16-LIB188-009-Q1-E1-D7
gggatacatgtgcaggctgaaccgaagtgatagcgacagctccaccctgtccaagaagccaccttttgttcgaaattccttggagcgacgcagcgtccggatgaagcggccttcatccgtcaaatccctgcgcgctgaacgcctgccgcgcacctcgctggacctcgagttggacctgcaggccaccaggacctggcacagccagctgactcaggagatctcggtgctgaaggagctcaaggagcagctggaacaagccaagagccacggggagaaggagctgccacagtgggtgcgggaggacgagcgcttccgcctgctgctgaggatgctggagaagcggatggaccgagcatagcacaagggagagcttcagacagacaagatgatgaagtcagccgccaa

SEQ ID NO: 713 - DNA, 418 bp, Bos taurus
  Clone ID: 16-LIB188-013-Q1-E1-D7
acatagaagccagggtgacaaaaggtgaaaccctcacctaggactgtgccatgctgctgctgggaagtttgttcttacagcagccagcctctcgtgggaaaggccccagcagccttcagctccttcctctctccttaaagaacaacagggcttattcttgtttttctttttttcaaaagtgtggcctttgggctctgccatgcacacccagaagtgtgatgtggcgtgtggggaggagtccggggccctctcggaaacattgttaggcattttacctctgcagtaacattctgtagaactacatgtcaacacatttgaggcactgagagccaaaaacctgggactctgtcaaggtcctcgccacctctctctctctctctctcagtctttccttatagctctcattgcctgtgcattg

SEQ ID NO: 714 - DNA, 432 bp, Bos taurus
  Clone ID: 16-LIB188-014-Q1-E1-D11
acttgtaaacaagtatgtaaaatggtattccctatttataggaaatgtttacagaaaaaatatagctagagggatcaaactagagttgatgtgaaggccatacatttttatttttccattctcctctttaaaccttccctaacactgcaaccacataaagttgaattttagaactggtagaatttctaagtgtggctcctaactggcagcatcacataggaacataacagaaatgcagtctttcgtatgctgctccacacctgcaacattctaggggtgaggccagccacgttttaacaagccttccagtaacactggcgcagcacttggccttccttcagcctgtgcataatctttaccagtctcttctgtaaaaatttcacttgagtagcctcctggaataatgggccctgacagatctgtcttccaatt

SEQ ID NO: 715 - DNA, 414 bp, Bos taurus
  Clone ID: 16-LIB188-020-Q1-E1-D7
gccaggggcgggatacaagagaaccaagaaatggctgatgaaattattgtctttagctgtggccatttatatcactcgttctgtctgcaaagcaaagagtgcaccatagaaattgaagggcaaacaagatggacgtgctacaaatgcagctcaagtaacaaagcaggaaagttgagtgaaaattcatctgaagttaaaaagggaaggataaccccatcacaggtaaaaatgtccccatcctgtcatctgtccaaaggggatcctgctattaaaaaggcaacctcagaacctgttctggatccacagcaaatccaagcatttgatcagctctgccatctctaccgaggaagttccaggctggccctcctcacggaactctcccagaatcgcagtggcgagagctgcaggccattt

SEQ ID NO: 716 - DNA, 99 bp, Bos taurus
  Clone ID: 16-LIB188-026-Q1-E1-D11
gggatacacacaagggtgtgtttctgtgtgcttgttgcttcctgctgcagtttcctgcttctctgggactcacgtgtataacatgatctatataaatgt

SEQ ID NO: 717 - DNA, 355 bp, Bos taurus
  Clone ID: 16-LIB188-026-Q1-E1-D7
accgcaaccttcactatggctacagcaaaattctcctccagggcagggtcagtagctacatccggttgaacttctttcgacatgatctaacactatggatttattcgattatctgcatttacttcaacttcatggactgaaattcaacatgacacaactgtcaggcaaagctgagtttccatagctgactggcccttgacatgcagcacgatcagctgaaccttcatgaccaaatacaactccagttcaagaaacgcatttcacatgacccattcctatgtgaccacactcgccgtgattgactggatgttcatgataattactcttaacctgacctatactgtgtctatgcagg

SEQ ID NO: 718 - DNA, 389 bp, Bos taurus
  Clone ID: 17-LIB188-004-Q1-E1-E1
ccggacattcatagattttattttaattgccttgtttgccttcagttcccttaatttccagggttaacatggatgtgtgtaggggctatatttgtgtatatacacgtgggttggggtttttgcatgtgtgggttccatggacgtatgatccccacaagctgtgggagtgattggccaggccttgtttttttaatgtgtgtttttgttttttcgaagaagaggatgctatttagaaaagaaaccgcattgcaaacctcttaccagctcatatgagagagcagattcctgcccttgagcacgctggtaagttgttatcataaatgttttaaaagagttttgagcatttcatgctttaaaagaacttcacaaggaatatgacacacaaagtt

SEQ ID NO: 719 - DNA, 381 bp, Bos taurus
  Clone ID: 17-LIB188-005-Q1-E1-E1
acttcaggcggaaaaactacctggaaacaggtaggggtctctgcttccccctggtgaaaacttgtgtgtttggcaatgagcccaaggccccggatgaggttcccctggctgcccgggcagaaccagcggagaccagtcccgcttggcaggccctgaagctgctgttctgtgcctcggggctccaggtgtcttatctgacgtggggagtgctgcaggaaagagtgatgacccgcagctatggggccacggccacgtcaccaggcgagcgcttctcggactctcagttcctggtgctcatgaaccgcatcctggccctgatggtggctggcgtctactgcatcttatgcaagcagccccgacatggggcacccatgtaccggt

SEQ ID NO: 720 - DNA, 404 bp, Bos taurus
  Clone ID: 17-LIB188-005-Q1-E1-E9
tcccgaccgctatgggcgcgggacacaggcctgagtttggagaaggtgaaagaacaatgccgaaggactccggcccgctagtgcctttacactggcttggctttggctatgcagcactggttgcttccggcgggattattggctatgcaaaagcaggcagtgttccatccctggctgccgggctcctcttcggtggtctcgccggcctggggtcctatcagctgtctcaggatccgaagaacatttggcttttcttagtcacatctggaaccttggctggcatcatggggatgagattctacaactctagaaaattcatgccagcaggcctgattgcaggtgccagtttgctgatggtcgtcaaacttgggatcagtgccttgagtaaaccccatcagtaatag

SEQ ID NO: 721 - DNA, 143 bp, Bos taurus
  Clone ID: 17-LIB188-009-Q1-E1-E9
taacaaatagttatacctgaaatctgaaatacagatttcatagcggaactcaggctccacggttgcaaggccaccgctggctcacttccatgacaggcatgtattacctttcagagctgagttggactgtgctgtgtccccgt

SEQ ID NO: 722 - DNA, 440 bp, Bos taurus
  unsure (21)...(22),(29): unsure at all n locations; Clone ID: 17-LIB188-015-Q1-E1-E9
ccatggtagccggatagacanngatgtanagcatgccaagacctccgtagccttgtgagttcctctcctgaatctttggggtgagaggggtgctgcttccagttcaaaggcctgacttctgatcaggttctcctcaggacacttcagtctccctgttcttcccccataaatggaacttgtcagaagcaaggacacccccctcacccccaagtcacagcccgaagaggagagctgaagctccctccttctcccctcaccccttctgccttatcttccctgctctgcattttagaaaattgcagctaattgttttaagggctggacggacggagtccggggacacaccttttatacagcacaaagctttgctccccccccacccttggttcccttctctcttccaaatggttggagacacatcaactgatggatgatgggat

SEQ ID NO: 723 - DNA, 453 bp, Bos taurus
  unsure (391): Clone ID: 17-LIB188-018-Q1-E1-E1
ccaaggcggcgggagaccactcgaggaggcagttttggttaacgctgcagggctgtgctcccagctcctctctctcctctttaccctgcattctctagtcgtaacaaacagaatcagctggttgagaagaaactcgcgcaactgaaaaaattaagaaatctacttcccttgaaggtggtgacagggtttctactagttctttctcactgtgtatcacgtttccacttacttaggaagtctgtttgattgcagctatgctgtcccgtaggtccacactagagctgatagtatgttaccctgaaccaggctgtggcagacaggacgagaagggcaaggggcaaagaggaaagaatgggaagggatggagagcagcctgcctgccggggaagtncagcaccctgctctgcacctaggaaacgcgtgggggactgggtgcagttggtttgaaagcac

SEQ ID NO: 724 - DNA, 223 bp, Bos taurus
  Clone ID: 17-LIB188-024-Q1-E1-E9
gacagaccagtagagcccactggcatctgttgcctgcacagcttgagaactaaactggtttaataagtcacaggctcagcctggttaggatgacctttgtccctctagacaaagggggactgagagggctgatcaggccctggctctggggcttatcctatgcagagaggagaggcctagtggctcaggctggccagaccacatctcctgaccccatgggggt

SEQ ID NO: 725 - DNA, 410 bp, Bos taurus
  unsure (63),(266): unsure at all n locations; Clone ID: 17-LIB188-025-Q1-E1-E1
gccatgggcgcgggatacatactaaaattccattatcttcaggttccacatgcaaagtcctgngtggctggagagcaagggatgagagaccctcctttggtcagaaatccagcagagttcaggctgaacagggtttggcactaaatctaggtatcctggttgaatgtatttggatcaggcaggcaaaaagggacctcatctaatcccagcccccacccagcgaaactgctggaagagccccaagttagtgacccggagacccctgnggaaaaggggatattcttgctgccagtagctccttcacctcacttgaactcccaacctccctggttctattatcactattctctgtcccctacacaatgactaaacaagagccctttgtcacaagtcctagtgaccccctcaca

SEQ ID NO: 726 - DNA, 332 bp, Bos taurus
  Clone ID: 18-LIB188-007-Q1-E1-E5
gccatgggcccgggatacaggtcaactaccagcaacaaaattatgtaccctgtttaccttgagctgacttcctgcaccagggctggtttcttaatccactcataatgctgaactgtggctgaggtgtgcctaagcctctctccactggtgacggatgcacatcacttaagttgtcgggagacttccacacatatcaaatggtaacaattgcctgcctgccactggagtcccttttgcaacactcttttctttccctgggctcattccaggacctgatggtgttccgtacaggatagtcactgtccatgctggctatagttttccggcatgaa

SEQ ID NO: 727 - DNA, 161 bp, Bos taurus
  Clone ID: 18-LIB188-008-Q1-E1-E5
gggatacaactccatatctcttttcattgggatcatgcaaagccatatgtcagactctcaggttctcttcgaacacaggcacgagtcgacagcctgtgacctgtgatgcatctagtctctgtcaatcgttaagttctccggtgctgttctcagtatcaaca

SEQ ID NO: 728 - DNA, 419 bp, Bos taurus
  Clone ID: 18-LIB188-008-Q1-E1-E9
gccatgggcgcgggatacttcagaagaactgaggatacactgaaagaaaacaggaaaaaaaggtcctctcagcctctgcaccagggaaatggccaggatggattgtgctggttacgggtaaaggagcaggggcgggacctcacgactggcaatgaggagaggatttggccaaaggatttttttaattcttattacaaaagtaccatttataaagtatattgatcttgtatcttcatttattagaaagtatactgatcatgaatcttcctttattaaaaataagctccttcacagaaatcaggatgctacagaagaggaaccagcacatcctatgactggctgatacttaactctgaagaatgcaactttcatactgagaatgatttctgagcttggtactgacctgctttggccaactc

SEQ ID NO: 729 - DNA, 283 bp, Bos taurus
  Clone ID: 18-LIB188-010-Q1-E1-E5
actcgtagaaatcctggtccatcctgctgatgtactttcacatcaatgctttgcgagacagaatggccatgcccacagccacagatgagggaacaggagtgtagtagtgctccaagtaattggtggagactacgatggcgtatttgtccatagccagcaacatcatccatttggtgccaaagcacctgatcagcacgggcgtgtaaagcaaggcggcgatgggcgtcacgttgctccgcaacaggatcgtgctgtcaatctcgagcatccccatgttgccgtc

SEQ ID NO: 730 - DNA, 394 bp, Bos taurus
  unsure (338): Clone ID: 18-LIB188-011-Q1-E1-E5
gccatgggcgcgggatacgagtgcacgggcctggccccaacgggagagatggaggttcggaacccattgttcgaccatgcctcgctgtccgcgcccccgctgcagtgacctgaaggctgacacccaccctttcgcccaccctctcgaggacatgatgcacactggtggggaggagcagggggcccggcctttcccattagagagggtgtcctgatgcgcgcctgcttgtggctggggcctcagcggctaggaacccctcgcagggcagactcctgcctgactgtgcccccttgttgcacctgtcccaagtgtggaacccccccagtcgaggggaagangagaaccctagagaccaggcatggattggtaataccggaaacaagccaattaaagt

SEQ ID NO: 731 - DNA, 362 bp, Bos taurus
  Clone ID: 18-LIB188-015-Q1-E1-E5
acaagtacattttgacagggcttctattttgaccatttcaccccaacggttggcagcactgatctgtaacagctgaaataccaaggagacagcctttccttggttcccatcccactgcaggcccttgctgaatagtcattaacatgtacgaataaacttggtcaattattatttaaaacatggcagacactggccataaattaattacaccaaaggtaacaaaggctttagctgaaaatttctgaaaaggtgcatactatgttattaaacaagatgatgttaaatgacagaaatttaaagaactcaaccagactaagcagcaccgagataggttaaggggaaaattaagtttcctcagttgt

SEQ ID NO: 732 - DNA, 428 bp, Bos taurus
  Clone ID: 18-LIB188-018-Q1-E1-E9
acagagtccatgggctgaggggccagggctgtagggcaggggtggcatttcccaaggcggcaggtgagaaggtgtgttctggcataaaaaagagttcttgggaaaaaaaaaaaaaacatttcttgggaaaagttcctgtgtcgcagtggtgcctgtgatgagggatggggtggcatgcacttctcagccaaagacactcttggcgggtccagctttgggcttctcaaacacggtctcagcgccaatccgggcgcggctgaacactgacggggcggtagaaccagcttgctcacactcccgcatgacctggtaagtcttggacttgatttcctggttcttggtcaggttccctcgggcccccttcaggtcctcctccttcacggggggccacttcttcttgatgggggcttcctgaacgccagcctggg

SEQ ID NO: 733 - DNA, 384 bp, Bos taurus
  Clone ID: 18-LIB188-020-Q1-E1-E5
ccatgggggcgggatactcacccataatcatacctgtgtcctcctgcaactgtggtttagaactgcacactcatagtagtatatatatatctcgtgcctgtcttcacaaaccattcattcctcattttgatactcaccacccccaggcctgagctatggatggcaatgtgaaattgaacatccttgatagttggcaaaaccggggaaacggctccaataaacgcttggggcgccaatctaaatccgtttgcctgtctccatggggaatcaggtggccgccattcccttgataattttgagcccctgtggggggcggtgggcgatggggaaccctcacctaagacaccgacaggagctaaacttggggggcgctgtgaccagcgt

SEQ ID NO: 734 - DNA, 372 bp, Bos taurus
  Clone ID: 18-LIB188-023-Q1-E1-E9
ccatggccgccggataccacacctgcatctccactgtggacagcctcaccatcatctggaagtacacactgtctaccagctagatcaggaggaagttctgacattgaaacacatgacggacgctcttcggcacagctaaatcaaacatattgcagtcgcagggtctcagactcggctatagttccgcaaagcctaagcctaaaagcaactatcatcacgcaacgtctctacctgcattagattcatcaatataaccattgctttcccctgcatctcgaccaaatgccagacctcacacaacattcgaagcatagcatgaatcttctaaaatgtcatgcatcccacctcgactactcatcgtcaaactctttt

SEQ ID NO: 735 - DNA, 418 bp, Bos taurus
  Clone ID: 18-LIB188-026-Q1-E1-E9
gggatacataacatttttcttccactccaaaagcggttctaattgccaacaggctgatctaagctccagaagagtgtctccctctgaagcaatctttctttccccctcacaaggctcccagaagccctagttggccttgacctgacacttcctttttattaggcgtcctgttggggtggctgagaatcatgaaaaacagatcctctgctagcctccatgatgaagttgttagacaccagctttctgggaactcgtgtttgatttttaaatggcatgtgacccttctgtgttctggggactcaatcagaaaggtaaaagccattaacaaaagttagtaagagttttattcatctcatatcttcctgcctgggttcacggccttactgactgaaataaaatcatttctgattggacgcag

SEQ ID NO: 736 - DNA, 279 bp, Bos taurus
  unsure (29),(47),(76): unsure at all n locations; Clone ID: 19-LIB188-002-Q1-E1-E3
tataaaaacagtcaacgtaggtgcctganactctaattctgaagtanataatcacatgccagaaaggtcctcacangcaatggagtgccaactaagctggagtccgaggaaacatagctagttgcccagatgtcctggtaggcactcattcctcatcagaggggctgcagctagagctatcaggctgtgccacaatcaaaagaacagaacagcttcttctctctggcaatgcttaaaatctaaacaggaaaacagtcttatcccaaagcagcaaaaggt

SEQ ID NO: 737 - DNA, 370 bp, Bos taurus
  unsure (363): Clone ID: 19-LIB188-005-Q1-E1-E11
acccactgaagctctatcccgccttctttggctattacttcttcaatttcatgatgggagtgctacagctgctgcatatcttctgggcctacctcattttgcgcatggcccacaagttcataactggaaaggtagtagaagatgaacgcagtgaccgggaagaaacagagagctcagagggggaggaggctgcagctggggggggagtaaagaaccggcccctggccaatggccaccccatcctcaacaacaaccatcgtaagaatgactgaaccattgtccctgctgcccctcagattaacgtataaagccaaggaaataccccaccctccccacagggtcactttaagctctggggagaangagaaag

SEQ ID NO: 738 - DNA, 426 bp, Bos taurus
  Clone ID: 19-LIB188-005-Q1-E1-E3
tggcggccggatactggagttaatctttcaaatccaaattgaaaaaatacaaattgaaaaatagaaatatttaattactaaattttttttgttttctctttcgtaattcttctgctccctggactatgaagccggggggtgggcctcatccatgccacccccagatgtcaagggcgggactggtggctgagaactcgacctggactcctgaagctgggggcagcactgaacttgattcagttgtgtaacggaaaatggctgctcacaagcgtgggcgcttccagacatggagattcaggcgactgctggagagtggtgagggctgtcttccgagggagcccactgggcgaccggcagcccactgccctggagatcagcggctagtatttgcggtccgcactcacatgatcaacagcaaccaagaaa

SEQ ID NO: 739 - DNA, 373 bp, Bos taurus
  Clone ID: 19-LIB188-006-Q1-E1-E3
tgggcgcgggctaccaggctaccgaccaggacatgcgtgtcctccggggggcgtcctggatcgacacagccgatggctctgccaaccaccgggcacgtgtcaccaccaggatgggcaacactccagattcagcctcagacaacctaggcttccgctgcgcttccggtgcaggccgaccgcctggagagctgtgagtggctatgcagaaaccagaagagtcctgtggcacccaggccactccccggccacattccaaacacagccagactccagatgaccttcatccccttccccatcctctgtgacaggcacctctccccagggcaggaaaggaccctgacctccacagaatggtgatactgtgtcttggaga

SEQ ID NO: 740 - DNA, 251 bp, Bos taurus
  Clone ID: 19-LIB188-007-Q1-E1-E3
gcttatttttatttttattgttttcttgttgcgagatcggaatgtggacaaagtggacgacacccccgcacctccctgcgatctggctggcttggatctcgtttttaaaccccttcctaacccgcctgcccactagatttggcctgtgtgctgctctcttggggccattgcaccatcggccacgtgacgttctcttaccgaaccccgcgttaccctacacgtgtctgcacaccttgttctgtagcgtccgt

SEQ ID NO: 741 - DNA, 250 bp, Bos taurus
  Clone ID: 19-LIB188-009-Q1-E1-E3
acccgcacggcaacacccgagcgccacaaatccccattgctttgccctcccatctcttcacttgtgtattcactgatgagaaaagcaaaggaaacaagatgtgattctgtcggtctgtgctctagttgcagtcgcactgtgtgaacactgtctgcccaccgggggaagtcctatctgctgctgccacaatatagtcatgctgcttgtgaagtgcacggagttgttttgacactggcacccactgtaatgt

SEQ ID NO: 742 - DNA, 282 bp, Bos taurus
  Clone ID: 19-LIB188-010-Q1-E1-E3
actcgtagtatttctgggccatcctggtgatgtagttgcccatggaggcccaaagagacacaatggccatgcccagagccacagctgagggcacaagcgtgtagtagcgctcccagtagttggtggagacgaagagggcgtagatgcccacagccaggaacatcatccacttggtgccaaagaacctgatgagcacgggcgtgtagagcagggcggcgatgggcgtcacgttgatacccatcagcatcttgctgtcgatgtcgggcagccccatgttgccgt

SEQ ID NO: 743 - DNA, 410 bp, Bos taurus
  Clone ID: 19-LIB188-011-Q1-E1-E3
ggccgcgggatacccatcaacccacacctctggaaggagcactgtccttggacatcaagctcatccccacccatgaaactatcacttacacttcaggccacagtctgggggcaaagcctgaggctaacgataaccagatgcagctgaaagaaaacaggggtcctcaagctgggacatcagccacggtccctgtgctgtccctcttggacatcgttttcatcctcgctggagtcctactctacgtcgtgtgcaagcagatgaagaatcagctcctacagcatctcccacatcttgcagcttcattatatacctgcatcagactaaccaatgcagaaaatggaaacttgtgatggcagattgtgattttatcaccatgaatttaatatactagaaccaatttttggtataca

SEQ ID NO: 744 - DNA, 448 bp, Bos taurus
  Clone ID: 19-LIB188-018-Q1-E1-E3
ccggatacaaaatggaatcacactggttcaagcaacttatgcaacgtaagcaaggacggaaacgaccactaaaaagatactgtcataaaaaaacagatgctggcaatgaccaagaatagggctcatttttagcacaccatgttagagctgcctttttggatatcatagaaaacagaagatagacatgacagagccctagtgtagaaaaggaaaaacttggctaatgcgaggtagcaaacaggatcagtttatgagtcagaaatgtgatttgtgaaaattcagttctacttgtcaaaaagtattgaaactgttacttttcactgaatgggaaagagtgaagccagaaaagttacaatgatcctcagacttaaacaggttatattagaaccattcctaaatacaagaagttaaggcaaatcctctgttatataattgtatgtttaaaaca

SEQ ID NO: 745 - DNA, 271 bp, Bos taurus
  Clone ID: 19-LIB188-019-Q1-E1-E11
ggccgcgggatactttttggcaacccgtggcacctttcaacacaggaaggtagagggggtttctctcccctgcttcaaccccttcttttgatagcatatatatgatggtcttctgggtcagaggtggggaggaagtggagagtgagccaagtcaagcactgaggccagttgagagcagcatctgttcaaggcttcctcagggcttgtgtggtagacagcaggccccccggcagtcacctggttctctgaagctgcctggggcctctctggt

SEQ ID NO: 746 - DNA, 393 bp, Bos taurus
  Clone ID: 19-LIB188-021-Q1-E1-E11
tggccgcgggatacttttgcagcttcagcatatttattgggtttgtttgtttgattaaatcagttctacagtggatttaagggtttttcctctgtagctcaaaggtggaaggcgtttattttattagctaaccaaatatcattgagaggaatttgaactactgttactaccaaagatttttattaataaaggcttctattttggtaacacttctctatatttttacttacaggaatgttactgttggaaattatcattttaaaaaacttgtaaaaacaaacctccatagctgataggaatggtctcaacttgcagccccattatactaacgatgatctgaagtttctcaagcacgcagagaaacgtaagagaaacgttccagcaaagggaagg

SEQ ID NO: 747 - DNA, 424 bp, Bos taurus
  Clone ID: 19-LIB188-028-Q1-E1-E11
ccatggccctaccgccataggcccgggatacttctcacagagtcaggtaggggatcaaactgtagagaggacctggtttggaggtgtagggactccagtaggctgccttcctgtgaagggctttaggctgttcccctaggagggctaccgaggggcttgatgaggctgggggactggggtggtagggcaggttaggttgggccccaggcagacagcgattcttctgaggggtgaggtagagtgcttccttcagccagcccgggcagagaagaagggcagagagcggacgtaggagtccagtcgggagcggaagagctcactttgcacagtctggccaagcgggcacaggggattcttcaccaccagctccacatacagcgcactgtacatgtggtgcagcacatctcggatgggccccacgccc

SEQ ID NO: 748 - DNA, 328 bp, Bos taurus
  Clone ID: 20-LIB188-001-Q1-E1-E7
atgccgcgcgatacaagcttattaatttttggttttatttttttttttggttttttttgttgtattttattttttattttttcattttttttcctgttttttttttcattatttctgttgcctgcacaactataaccaaatttaaacccaaaaccaaaaaagaaagggaagagggctcacccgggtcccaaaaaaaccaaggagaattcaagggcaaaactggcccccccccaaaacatggccccacacacccggccaaacaccggccaaaccatttggcaaaatccaagggcacgtgcgacagggggaattcccccaaagaaggcaa

SEQ ID NO: 749 - DNA, 413 bp, Bos taurus
  Clone ID: 20-LIB188-006-Q1-E1-E11
acttgtaaacaagtatgtaaaaatggtattccctatttataggaaatgtttacagaaaaaatatagctagagggatcaaactagagttgatgtgaaggccatacatttttatttttccattctcctctttaaaccttccctaacactgcaaccacataaagttgaattttagaactggtagaatttctaagtgtggctcctaactggcagcatcacataggaacataacagaaatgcagtctttcgtatgctgctccacacctgcaacattctaggggtgaggccagccacgttttaacaagccttccagtaacactggcacagcacttggccttccttcagcctgtgcataatctttaccagtctcttctgtaaaaatttcacttgagtagcctcctggaataatgggcccc

SEQ ID NO: 750 - DNA, 384 bp, Bos taurus
  Clone ID: 20-LIB188-006-Q1-E1-E7
catgctacctaccgccatgggcccgggatacccccatagggtcaggagatgtggtctggccagcctgagccactaggcctctcctctctgcataggataagccccagagccagggcctgatcagccctcccagtccccctttgtctacagggacaaaggtcatcctaaccaggctgagcctgtgacttattaaaccagtttagttctcaagctgtgcatgaaccagttgctagtgggctctactggtctgtctagtaccgttagggggaaagtcctttttcttttctggggtgggcatgtttcattacccagcagatagaccacatcagagacatcctgtccttttcgtcacattccctgagtataccaaaatgtcaccgctgc

SEQ ID NO: 751 - DNA, 320 bp, Bos taurus
  Clone ID: 20-LIB188-010-Q1-E1-E11
acttcgagacactgagggggtaagaagcgacaggtgggtgctaaaggggccgcccagccatattctttccgtgtcgtcatccgagtctgcgtggcacaatgccttggcatctcgccggacactctgctggttgatctcctgtttctcttctacactcaggaaccagctgtcacccaacccagacttgtgcccacagatcgcccagcgaggccatacgcaacgtggcagcttcttctctagcatcacagtggtggtcacaagctgcactcatccagatctcatcacgctcatgggctacaccccagtgagtgtcatccatc

SEQ ID NO: 752 - DNA, 406 bp, Bos taurus
  Clone ID: 20-LIB188-016-Q1-E1-E11
actcagtttatgccctaaataacttgtataaaaatccctgaagtattgtgtgggtgtgtgtgtgagtgtgtgtttgttatatgtctggcaattaaaactttgtcttctggaaattagcgaattctctttttttctccagaagtgtttgttacaagatttgtaaataagagctctacttagtttgtttaccaagaacatgttgcagcaaaccttttacacctaattcccacgaggttgaagtaacgacttttaagatttgccagggtaagcagcagccaggttctcagtcattgttggccttgattcatctttcagacttcattttcccagctctaaaattcccagtattccttaattgtagtccttttatgttctagaagcaggaagggggaaagagaagacctgc

SEQ ID NO: 753 - DNA, 408 bp, Bos taurus
  Clone ID: 20-LIB188-016-Q1-E1-E7
acaatgaaaggccattttctttcacaaaaagtcactgcaatctagaagtctaactgggactaaagctttgaaggggaagcccatggccccttcctgagccagagctcaggcagggagggcgctggtctttctaattcaagagctggggtgttcagagcaaatgtgatgcgggaagaccaagacctgggttccacagtggacatggatcagtgcaccactggggttacttgaaagactggagggaggggagccccctgaagacagaaggaaataggagacggtctggagaggtcaatagcccaggaccctgtgacagacccctcctgccaccagggacatgtgtcaggttcagacccacatggcgccgccttgcttctttaggtggacccttcagcatcgtgcctggtg

SEQ ID NO: 754 - DNA, 422 bp, Bos taurus
  Clone ID: 20-LIB188-020-Q1-E1-E11
acaagttcacctcggcccgtctgcccagcaaggccccaggttcaaagtgctgggaggtgggcccttcgttccgaccccagcgcacacgcagctccaagttgccggaccaggaggcttcctcaagcacgatcttccttcccccacccatcctcagagacctggcttggagctgggacaaggaggtcacagggaggccccaaaccagccgtttgggtgtgttttgactggtaggtggtatgctgtcccccgggttgacttgatgttctgaaaccagcctcgcactggcagattcacccatgctgaccccgacgtatacagcttctgaccgttagcacagacacactcagaggggtcacacatgcacacatgccgtgtggatgggacctttgcagtcagtcatgcttggaccacatggacactca

SEQ ID NO: 755 - DNA, 412 bp, Bos taurus
  Clone ID: 20-LIB188-021-Q1-E1-E7
catgtacccgaccgccatgggggcgggatacaagatggacgcctctgcagcgtacgcgtctcatagaccccagacccctgacagagagctaggcaaagcatctctcctgcaagttaagcgggtttccagtattcccatgtagacgacccttcagagacaggcactcacgcatatctttagaatatactatcttggctctggctgcgttaattatgcctgaagagtttaattcccatccaagtctaaaggtggtagaacacatggtcaggtatggtaatcaggaagagcagactgtacatcgcacagactggtggtgctagtgcagccctgagggaagtcatcatccacagaggctgagtaaaacagtcctagcaaagataccagtggaatcaggacagtcagcataagaaga

SEQ ID NO: 756 - DNA, 155 bp, Bos taurus
  Clone ID: 20-LIB188-024-Q1-E1-E7
tacaccctaaagtgagtcgtattaatgctacccatgtgtacatccacggtctggacaaatccaacaaagtgatgcaccaggttaccatactccacgttcagcatgaaaaacgatgcggctgcctctcctgtcatgatcacagggtctttggcttt

SEQ ID NO: 757 - DNA, 429 bp, Bos taurus
  Clone ID: 20-LIB188-026-Q1-E1-E11
gccatgggcgcgggatacttttgaagcttcagcatatttattgggtttgtttgtttgattaaatcagttctacagtggatttaagggtttttcctctgtagctcaaaggtggaaggcgtttattttattagctaaccaaatatcattgagaggaatttgaactactgttactaccaaagatttttattaataaaggcttctattttggtaacacttctctatatttttacttacaggaatgttactgttggaaattatcattttaaaaaacttgtaaaaacaaacctccatagctgataggaatggtctcaacttgcagccccattatactaacgatgatctgaagtttctcaagcacgcagagaaacgtaagagaaacgttccagcaaagggaggggcgaaaacacgaacatgtttgtcttgaacatg

SEQ ID NO: 758 - DNA, 430 bp, Bos taurus
  unsure (352): Clone ID: 21-LIB188-002-Q1-E1-F1
catacatctgagctttataagcgcctgggaggaacagggaacttggttgagacatttcataacagcatcgctcccttcctagtgcaggaagcttccgctcagaagtcctggcgcctcggcacaggggccacgagctctcctgggctcatagccggtcacagccttggggggattcggcagcggccccagtcacagggcaagccagaccagatttctctgcatctgctctttgacgaactcaagtttggctgtcagagaaatatgcttcatccctgcggttaatttttacacatccttgaaaacatttccaagatcctcagatggtgaagcagatagatggtccttaaggaangggttgggtcttctctctaacatgagcatttgtgaaaaattcaccgcttcaacctttaatgctttgaaagcccctgaa

SEQ ID NO: 759 - DNA, 302 bp, Bos taurus
  Clone ID: 21-LIB188-004-Q1-E1-F1
ccccaaaatcatactggtgtctcccggaaccgggggttaaaaatggggacccaatattggtatctttatgtccctggcaggcctcaacaagcaattcttccctcctttggataccaacaaccccaagtcctgggcaacggttgccaattttcaattgcacacccttgatatccggacaacaaagggaacagggctccagtgaccgctggggctgccagtcaaaatccgtttgcctgtccccatggggaatcaggtggccgcaattcccttgagactttttagcccctgtggggggcgggggg

SEQ ID NO: 760 - DNA, 424 bp, Bos taurus
  Clone ID: 21-LIB188-005-Q1-E1-F9
tcccgagcgctatgggcccgggatacaaaatggtattactgtatttccaccaagcaccctgccctccctccggatttcagtcctatgccaagccccctgaccaagaaaccccaaatggttggcttaaaaaccatcaagggaagggtcctgggcaaagggcctcacgtgggcctgggaagacagcatagagtgggcagacacactgaaggagggataaagatgctagagccagacagacagcttcttcccaagggacaccaggcacgatgctgaagggtccacctaaagaagcaaggcggcgccatgtgggtctgaacctgacacatgtccctggtggcaggaggggtctgtcacagggtcctgggctattgacctctccagaccgtctcctatttccttctgtcttcaaggggctcccctccct

SEQ ID NO: 761 - DNA, 385 bp, Bos taurus
  unsure (283): Clone ID: 21-LIB188-007-Q1-E1-F1
tcccgaacgccatgggcccgggatcacatttctagcctgatggaaggtctgtggttgataccgttggaggaaagcggtttaaggttttaaaaagaagaatgaaagatggatattgcaccgcagacattgaatacctggaagatattaaggttgagaatgaagatgaaatagagaacctccggcaacttcatgatttggtctactctcaagcctgcagctggtttcagaatttaagagacagatttcgaagccagattcttcagcactttggattaatgcctgngcgggaggaaaacctgcaggcaatccctaatggaccggcctggtgttggtggcttcttgctgtccttcctgttgacccccgctatcagctgtccgttttgtc

SEQ ID NO: 762 - DNA, 424 bp, Bos taurus
  Clone ID: 21-LIB188-018-Q1-E1-F1
ccggatacacacggagaaactcagggaaatggttggtcccccaaacgggaaaggcaacaaccggagcctaaaaccaacgggggccccgggaaggtttccccgcaaccccaaggacttaaaaaacttaaaactgggggcccttccccggttaacaagttcaaaaaacctcaggctacttccctcctcttaagaggaatttcttgaattcttaggactttccattttgaaagagtgtagcttcatattgcttattattgggtccttttgtatgctttttaactcgactcacagtctgtcttcccctggagggcatgcatttcagtattatagaaatgcagtaaacggtaataaattatttacaagcacctagttcgtttaatcttacgtgaaagccatttgcttttggaaaacaaggagaataaat

SEQ ID NO: 763 - DNA, 367 bp, Bos taurus
  Clone ID: 21-LIB188-019-Q1-E1-F1
acatcatgtacatttgcttaataagcaaaacaaaatcagtctggtgcccaggctgcaacaacatcgggagggccagagtctctgtggctgggggacatggggtcctcaggtaacccctccccttgctggcctgtctcggggctccaggccgaggaaagacttcagtcctcagtcaccgggggaggaatgagctgcagctggaagttctccttctggaagatgctgttgaaggcggggccactctgggaccctccaaatggcctgcagctctcgccactgcgattctgggagagttccgtgaggagggccagcctggaaactcctcggtagagatggcagagctgatcaaatgcttggatttgctgtg

SEQ ID NO: 764 - DNA, 413 bp, Bos taurus
  unsure (5),(140): unsure at all n locations; Clone ID: 21-LIB188-022-Q1-E1-F1
actangaggtcccctgaggctccccagtcacgtcgaaaggactagcagtggttcccatgagttcaggacagtgcctcccatgccaagtccatgggaagttacaattttgggagtgacagttgaggctggtgctttgctancacacttggggctgacagatgcttgctgtgtccagggctactcttccaagtctgaaacccccaagcctccacactgtgcctccagcctcctgcctccaagctggaatcctggtgcacattaatgcctggctagggacagacagaaatcctccacaaaaccagacatgtcagcatcagaaaaggctctgatggagacaggatgaacttcagaatgggcttagcctggacctcaaactaattctagtgataaattagtggaaagagaaagaagac

SEQ ID NO: 765 - DNA, 453 bp, Bos taurus
  Clone ID: 21-LIB188-023-Q1-E1-F1
catggcagcgcgatacgtgccaggcggattgttcttgactctggtgaagttgatacagcgtcccgtgtctcctggctgtggacgcatcacggacacacgatcgtagcctttccttagtaggacccacaaggcatcaagttttcccttgatcggagaataccactttcggggagaggagggccggcgcatgttgttgttgagatttcggggttcagggaactcatactcctgctctggcatcttgactcttgcattctttgctttctccaacttagcaccttcttctgtggagcccttttctccccaacgaacctccatccttttaatgcctccaacgcctcggccaccataataagaagcgtctaccgtaggccactttttcttaggcagaccatcatcatcttcttcctcactttcctcagcagggggtggagggacctccttgataatcac

SEQ ID NO: 766 - DNA, 277 bp, Bos taurus
  Clone ID: 21-LIB188-025-Q1-E1-F1
ggataccattcgactcttaaagatcagtagtaactatctcttcattgccttaacacttgttttggatggtctgggcctcatctccagcagggacttctattatacactcatgatgtgcctcctagagattgtgcttggacctcattttggggctgtcaggtgtcactggacattcctccggagaactgtgcacgtcatcgtcactgactagcctgctcagcaaaccattacgtctcggtcttaacccattgcatcacatgagtctcgcacttcggac

SEQ ID NO: 767 - DNA, 259 bp, Bos taurus
  Clone ID: 22-LIB188-003-Q1-E1-F5
acagacaaaagcagccttggaaacctgacacttgtaggatcggggtcagtcagccagcaggtaggtgacacaggtaggacctggagcccagacctagggcctcttctccactgagctttgccccaaacccctcagtgcttgattcattcagaccagctaggcttgagctccgtaagtcataaaattaacttaaatctgatacattggagaagaggaaccatgattaattaccatcctgtttgtggagaagaaacaatgt

SEQ ID NO: 768 - DNA, 404 bp, Bos taurus
  Clone ID: 22-LIB188-005-Q1-E1-F5
acacagaatagcgtacgctggttcaacacagatgtatgaaaatcctgtttgaacacgcacagttgagagagatgtatcacaatctagcggatcattatcctattgtgtatgcacatgatatgatgggggacacactcattctattcaggctcctgtttaaagacgctgattggcagaagtcattgggacttcaaggtaaagcacaacgaaaatcagtcatggggagtaatgttgtccttaggaaattgagaattgaacacacggtggactacaacaacatgaagcacactatggtaaacctattgactgaattgtcctgagtaaagtattaacaccctgttgagtttgctaatacatgctaagcgactaaggacttccctgaagaggacacatgatggatacat

SEQ ID NO: 769 - DNA, 386 bp, Bos taurus
  unsure (376): Clone ID: 22-LIB188-018-Q1-E1-F9
acttcgagaaactgagggggtaagaagcgacaggtgggtgccaaaggggccgcccagccacagtctttccgtgtcgtcctccgagcctgggtggcacaaggcctgggcataacgccggacacgctgctggttgatatcgtgtttctcttccaaccgcatgaaccagcggtcactcagcacagacttgtgcccacagatgtccgagcgaggccacatgcaatgtggcagcttcgtctctagcatcatagtggtggctataatctgcgctctccatagcacatctcgctcgtgggctacacgccagtgagtgtcaggcatcacagcgattatgaggttgagcatgagcacagcaccgatgatggcgaaggcaacgtangtgatgctgt

SEQ ID NO: 770 - DNA, 294 bp, Bos taurus
  Clone ID: 22-LIB188-027-Q1-E1-F9
accagatatgagctttcctcctgcctcctgcctcccaccaaagtccagatctctcacctgccaggtcaggggtggggtggttggggtttagaacagaatacagggaaatcgaggagcaggctcacacctcgccccaagcacagggcccagcgcgaatagggaccctgcttcacccaccctggccttaccgccctgtctgagcaaagcactttacaaaaggccgggatgccaccttgggcaccagcctccatccagggtcacagctgcagacagccgcagaggttcgggaggtgt

SEQ ID NO: 771 - DNA, 328 bp, Bos taurus
  Clone ID: 22-LIB188-028-Q1-E1-F5
acaattgccaagtctgactggttcaggtgcccttccaggcaatcgtgtgcatcatcatgctggtttggcactactatcatctgatcgaggtcggcactatgccttgatctgtctccgggctatccctcacaaaatcgccgatgctgtcatgtcgggtcgtagcactgtgttcgtagcaggccgggaccatcacctgctgcggtcagtaccagcaggcatcgatgagacaaacgtgtctcgccacgacacattattatacagttcacgtcctgaagtaaggcatcagctttcactgaagaatctgaatcgcgagaagtcttgacataca

SEQ ID NO: 772 - DNA, 409 bp, Bos taurus
  Clone ID: 23-LIB188-005-Q1-E1-F3
ctcccgtacgcaatggcggcgggatacttaactcatatctgggtcagaacctagatgcagaccttgtttccagcgttagatgaaggccagaccaaggggtccccgaggtccttcctcttgagctaaaacttgcatcttgttactggggttgtaggggggaaggtgtggtctgcatttgccagatgggcaacgaattagaaaaggaagcaggggcgggggttactgacctcagctggcttgagggcagagcatcctttccttgttgtgccccagtattgtagtccagtcctcgatgccacagtatcatgccagggctccgtgcccagcaaatgacagttgcagaagttcatggtggagcaacttgtcagggccagggcacctcccaagaagaccatgggtgcgtttctgc

SEQ ID NO: 773 - DNA, 406 bp, Bos taurus
  Clone ID: 23-LIB188-006-Q1-E1-F3
tgggcgcgggctacttccagaagtgagatccaggatttgaacactggggagtaaggagggagcccagcctgcagcccgcagttgttcacagccatgagatcgccgaccagcaggaaggggtaggtcagcatgctcaccgcgatccccatcacaaatttggtgtagctccggatggccagcgcctggctgaagctgtcatccaccaggtaggcattgatgaagtgggccagcaggttacagccccacaagaaaaccacatcgcccaggaggtgagggattaagccgctaaaaaaacaaggtgagcaaagataagcatgagagggaagggagcgattcctgggggctccacacccaggaagcatgcaaggatattccaagctctaaacttcagcgttatcctacaaca

SEQ ID NO: 774 - DNA, 404 bp, Bos taurus
  Clone ID: 23-LIB188-007-Q1-E1-F11
tgggcccgggatacaggcccattccatggcactggagccctgctctgtggctgcctcaaaagttgtatccatgttggaatcctcaaggaatttcatcctgaaagttaagagggagaaaaccaggctggtccctgaatcccaatcctgctctcgaacccagaaattcggctggttgaaggaaacattacaggttcccactaaatcatcaccattgccatcatcatcacagcaaacatagagtgtctgatgctattccaagccctttccatgtataaactcatttaattagcacaaaacacaggtggatacttactaggagctccattacacagatgaccactgagacagagagaactaaagcaacttgcctaaggttgcacagcataataataattgttaccctt

SEQ ID NO: 775 - DNA, 407 bp, Bos taurus
  Clone ID: 23-LIB188-011-Q1-E1-F3
aagggggaggaaagagtgctctccttcagggcagcaatcacaaagcctccactacaagggctggcacccactgagcgctgtgtggggtatgagacacagcctcgctccacaggacactgtcaacaagaagctcctttctttggagtcacagcaggacaatgatgggagaagattgggcctgtccaatgagagaaactctccttcagagccctgctgagcaacaaagcccagaggtcagaaaatggagacatctaacttggtggggtgaagaaaatataaaaaaattaacccccaaaagcattaaaagagaagtgacagctaggtaaggaaaccactgataaaaaccacagagccagtgataagacagtccaatctgaatgaagcagaacaatgagaaggcttccttt

SEQ ID NO: 776 - DNA, 402 bp, Bos taurus
  Clone ID: 23-LIB188-013-Q1-E1-F11
actttaaccatggcaggctggtgatgaacttgaccccagtgtgttttatagaagctctgcgaccttgtcatgtgacatgtggaagcagtctgaactgttgcagtccatcagcttagctcatttcaggtgagccagcagccataccttggtccccctgagaaggtcagtcagagactttgggtcaaagttcctacccttctgaacattctttttctcccaaggacattcacaaatagctacttgaatgtatgatcatgttcacccagtccaggcagaaatggggacgccgttggcagggagtattctgactccctttccgtggctgcaggtggtctccagaaataaagggcatggcctggacagcgtccactcaactcgtggggctaaagaccaaactgcccc

SEQ ID NO: 777 - DNA, 328 bp, Bos taurus
  Clone ID: 23-LIB188-014-Q1-E1-F3
gataccatgctgaaggtatcagcactgttaacgtgctgcacgaatgcccagccctctgggtgtctgatcaaatatacccagcaagcattacactcttgagggatgcccgggcctcggcccatggacaattaagtacatttaagcagggtcttctctttcccccttcctgcttctagaacataaaaggactacaattaaggaatactgggaattttagagctgggaaaatgaactccgaaagattaatcaaggccaacaatgactgagaacctggctgctgcttaccctggcaaatcttaaaagtcgttacttcaacctccatgggaat

SEQ ID NO: 778 - DNA, 419 bp, Bos taurus
  unsure (388): Clone ID: 23-LIB188-027-Q1-E1-F3
gccatggggcgggatacaatatgatagcatttactaccaagataatacaaggattctagaagaaaataaaaaggtgatagttcaatcagagatatgaacttccttccagagaagcaatgcttaaactgaatttaagagcaatacgcaaatgcaccagggatatatattatgggccatcagaacgttgattgttgtgaaagccacttaggaagtggagttgagccgtgaacaacacaagtttgaattgtgtagctccgcttacatgttggatttttttcggtagtaaatgctttagtaataaacaatcccaagttgttgaatctgcggatatagaaccatggttatggaaggcagactgtacgatatgcataaattttggactgcatanagagtcagcacccctttaacccctcaatgtt

SEQ ID NO: 779 - DNA, 438 bp, Bos taurus
  unsure (250): Clone ID: 24-LIB188-004-Q1-E1-F11
acaatgaaaggccattttctttcacaaaaagtcactgcaatctagaagtctaactgggactaaagctttgaaggggaagcccatggccccttcctgagccagagctcaggcagggagggcgctggtctttctaattcaagagctggggtgttcagagcaaatgtgatgcgggaagaccaagacctgggttccacagtggacatggatcagtgcaccactggggttacttgaaagactggagggagggggncccccctgaagacagaaaggaaataggagaacggtctggagaggtcaataccccaggaccctgtgacagacccctccggccaccagggacatgtgtcaggttcagacccacatggcgccgcttgcctcctttaggtggacccttcagcatcttgcctgttgtcccttgggaagaagctgtctgtctgg

SEQ ID NO: 780 - DNA, 254 bp, Bos taurus
  Clone ID: 24-LIB188-004-Q1-E1-F7
acatatattttattgcatgcactgtgaccttggggggagatcggaaggtggacaaagtggacgacacccccgcacctccctgcgatctggctggcttggatctcgtttttaaaccccttcctaccccgcctgccctctagatatggcctgtgtgctgctctcttggccccagtgcaccatctgccccgtgacgttctcccaccgagcccctcttaccctacgcgtgtctgctccccttgttctgtagcgtttgt

SEQ ID NO: 781 - DNA, 362 bp, Bos taurus
  Clone ID: 24-LIB188-005-Q1-E1-F7
acatacgttattatgactattgtctggattattaaaaatgacctgcaagatgaaaactgatttcaacctttttaaattgccacaattatagaaaattgaaatccagatcaccataatcggcaccctagaccagaaagtggatacgcctagatctgtcattaatcaactatgcaagcaagttaaaccaaggatttatattcaggatgtcatacatttgagtaatgagccactgaacagtaacatcactcatggatttcgcatcgggtggatatcaatggccacgtaattgaatcacctattgatcaagatcatatgctattcaggcttatccattcacagtgatagcaatagatgcatgacat

SEQ ID NO: 782 - DNA, 410 bp, Bos taurus
  Clone ID: 24-LIB188-015-Q1-E1-F7
accagagaggccccaggcagcttcagagaaccaggtgactgccggggggcctgctgtctaccacacaagccctgaggaagccttgaacagatgctgctctcaactggcctcagtgcttgacttggctcactctccacttcctccccacctctgacccagaagaccatcatatatatgctatcaaaagaaggggttgaagcaggggagagaaaccccctctaccttcctgtgttgaaaggtgccacgggttgccaaaaagttcgagcggccgcccgggcaggtggccgaattccgggcgccgggaggctgcggagaagatccgagagggtggcagctggaagccgttagcgagagctgggatgttccggatcgagggccttgcgccgaagctggacccggaggagatgaaa

SEQ ID NO: 783 - DNA, 435 bp, Bos taurus
  Clone ID: 24-LIB188-017-Q1-E1-F7
gccatggcggcgggatactgcatataccattgtcgagagggaaagaaacaggctttgaaggctcttgctcgtcaacagcacgtgtgtctgtagttgtatattgtgcatgtatttgtgtagatttaaattttctcctaagattttcactgacagtgtcagtaacttcaggggctttcaaagcattaaaggttgaagcggtgaatttttcacaaatgctcatgttagagagaagacccaaccccttccttaaggaccatctatctgcttcaccatctgaggatcttggaaatgttttcaaggatgtgtaaaaattaaccgcagggatgaagcatatttctctgacagccaaacttgagttcgtcaaagagcagatgcagagaaatctggtctggcttgccctgtgactggggccgctgccgaatccccccaaggctg

SEQ ID NO: 784 - DNA, 418 bp, Bos taurus
  Clone ID: 24-LIB188-020-Q1-E1-F11
actctagtttaaggcagcatttgaatggaagcagctgacttctgacaacagtcctttgtcttgaggcggtgagtatcttctgtgtttattatgccaggatttcactgctgactatagattcttcccagactgaggggctgaagatcgatcatgtttcaaagagttctttgaactgggctgtaggctagagcagagatgttttctttttctgatcataaatacttcaggttcacaaactacttcttcataatgccaaaactggaatgttctgtagtggggacattatagcagcatacacaaatgctaggatggaaacattagtgctggagatgtttgacagagtgatttgcactacaaatgtaaaacaaaacacaggctttgacaagaacaaaggattataaaaacatgcctaaaaatc

SEQ ID NO: 785 - DNA, 365 bp, Bos taurus
  Clone ID: 24-LIB188-021-Q1-E1-F7
accatgaccacttcctttgggcttctaggagcccactgtatccacatccccatcacacagcactgtggtgggagaggagcacggttttaactactctaggaattagggtcaactcgattatctactgggggtgggagaggggtgacagagcagaacagcagacattccaaacgcttgtcaccctagtgtcaacagaggagcacctggtgacacagtggacggtggcagcacccccaagatgtggggggtgatcttctgccctgtgatctgagctcctccctgctccctcttgctctgacccagagccaaggctggctccccacgcccaggctgccagggaggcttctgtaagggtgtggtgaagt

SEQ ID NO: 786 - DNA, 356 bp, Bos taurus
  Clone ID: 24-LIB188-023-Q1-E1-F11
gcgacggccgcgggatacaaggaggaggtgactggaactgggtgggtcatttagaggcttgaggtccatggttcatgcttgtgctgcagcagacatttgattgaggtctcaggcctctgatagagtgacattaccagggaatgacagggtgctgaagtctgtgactgaggggataacgtccaggattgtatctctgggtgagccgccacagttcaaggtgtttctatggcccaaggaaatggtatccagtgttatcctgtggctgcatggtctgtgcctgtgactgaggaatcagtgtctccatcagatgcagtggtgtttgggggacgacagtgcatccagttgtgggcgatatc

SEQ ID NO: 787 - DNA, 421 bp, Bos taurus
  Clone ID: 24-LIB188-025-Q1-E1-F7
gccatgggcccgggataccgagagatctgcatcgatagagataatctgaaaagcaagctggataaaatgaataaagacaactctgaatctttgaaagtgttgaatgaacagctacaatctaaagaagtagaactcctccagctgaggacagaggtggaaactcagcaggtgataagaaatttaaatcctccttcatcaaactgggaggtggaaaagttaagctgcgacctgaagatccatggtttggaacaggaactggaactgctgaggaaagaatgtagagatctcagaatagagctgcagaaagccaaacaaacggatccatctctggatgacaatctgaactgcagagatctgcagagactgagcgtttcaagtgacaatatgcaaagtgcatactgggaactgaagagagaaatgt

SEQ ID NO: 788 - DNA, 392 bp, Bos taurus
  Clone ID: 25-LIB188-005-Q1-E1-G9
gcgggacacgagtgccacgggactggccccaacgggagagatggaggttcggaacccattgttcgaccatgcctcgctgtccgcgcccccgctgcagtgacctgaaggctgacacccaccctttcgcccaccctctcgaggacgtgatgcacactggtggggaggagcagggggcccggcctttcccattagagagggtgtcctgatgcgcgcctgcttgtggctggggcctcagcggctaggaacccctcacagggcagactcctgcctgactgtgcccccttgttgcacctgtcccaagtgtggaacccccccagtcgaggggaggaggagaaccctagagaccaggcatggattggtaataccggaaacaagccaattaaagtatcact

SEQ ID NO: 789 - DNA, 309 bp, Bos taurus
  unsure (220): Clone ID: 25-LIB188-007-Q1-E1-G1
gatacaaccacaggatttatacaactaggttttgtatatcacaaataatcagtctaaatatcctagaactaaaactaacaacacaaaattacacaaaccaaactgggaaacgatgactactaaacaattcctgacgttacgttatcaagaggaggacattttaaaaaaactgtgcttcctaccactgctgcatgaatacaatgctctggaactagcaganagtataattcagaaatgcgagttagtggacctcaatcataatcatgtgccatatatgcttacctaacaattatttctctatttctcaaa

SEQ ID NO: 790 - DNA, 393 bp, Bos taurus
  Clone ID: 25-LIB188-007-Q1-E1-G9
acatctgtagcaaaggaatgaggattctgctggtaagtttccaggacagatagacacgcatcctcaggacagacagacacatccactttccaagcaagacatcaagctcactggaaacaccgagtagaatgcatagcttgtggtggcggcagccatttctcccatgtctgagttacacagaggaaaggtttgccctccctcgccggcccgtggttacagggcagcttcctgccccagcctgtcggctccctgatggccacagggtgctcaggagaccctggtgctgtggggtgagacccagcttttctttgctcacgaggaacacggatgacagtgagatctgcagctgctcgcaaagacgcgggagttttgtacagcccaccctagtctcct

SEQ ID NO: 791 - DNA, 408 bp, Bos taurus
  Clone ID: 25-LIB188-010-Q1-E1-G1
aaacttattaaaatttctaaaacccaacatataactagcgtaatacataaggttcaagttaaaccagaaaacctccggccaaattaaaaggcttaaaaaggccaaatggcgttattaaaccatcggcaaaaggttgtaaattagccacataatactaaaaagttaataagggaacctaaatatataacggttgccagtgactttaattcatatatatacattttttttcactatttccatctgctgtatgtaagactttaaagacttcgaatgctgaggataaactgacagaccccttactcacacagcagtattcacatgcttgatttgtttttcgctttaagttgcatgacgtttctgcatgaaatattagttaatctcaatccacgaacgtaagggctcaggaag

SEQ ID NO: 792 - DNA, 435 bp, Bos taurus
  Clone ID: 25-LIB188-018-Q1-E1-G1
ggatacatacgtaactgctacacgttagagattaggtatccttcctccttgggggtttttttttccctcctttttcctaattttttttcccttaatttggaataataatttttttaataacaatcctcaattctaagagttgggtgacgaaacacatgaaatggtgtggagctgtccctcgggaaccctggttttcctgagcgcgcgtccgcgtgtgcaagacagtgaccacagctcgtcgcctcgacgaaggggaccgtcggcgagtccacggcgacggccggaggggaaagcaacactgttccatcccagagctctgaagcagcggatctgcgttctgaaaataggtttctttacgacagaagtcctttttttttttttctttttttctttaaattcctttttaaaattttttaattttaaagtctgaaggag

SEQ ID NO: 793 - DNA, 372 bp, Bos taurus
  Clone ID: 25-LIB188-019-Q1-E1-G1
actcttgcaaccactgttggcagtagccaaagctagcttcatagtcttaccaggagagacagcattctgccgtaatgaactgtggtgccgccaaaaggaattttttccccctttcaactgttttacttaagttactggataagcagttgagtttacattaaaacaatgaaatgctatatcttgtccaaattctgcctcttccaaattggatgttttttttttgttaataatttttcacttccttatcaatcttttatagggggctagtgatgagaagggttaaaataaaactgcctacctttgaatacccctggggaacctggtgggctgccgtctatggggttgcacagagtcggacacgactgaagtgac

SEQ ID NO: 794 - DNA, 240 bp, Bos taurus
  Clone ID: 25-LIB188-020-Q1-E1-G1
caagcttatttaattttttttttttttttttgggaaaagaaaaagccctttaattggagattttgcaattgaaatgactcttcatctaacagaccacgtaaatgtttatagacattgaaaagtgctttcaaacaaacggcacccattcccccacgcgtttccaaggtgcaaaccaggggtgctggcttccccggcaggcaggctgctctccctcccttccccttctttccccttggcccc

SEQ ID NO: 795 - DNA, 255 bp, Bos taurus
  Clone ID: 25-LIB188-021-Q1-E1-G1
acatatattattattgcatgcactgtgaccttggggggagatcggaaggtggacaaagtggacgacacccccgcacctccctgcgatctggctggcttggatctcgtttttaaaccccttcctaccccgcctgccctctagatatggcctgtgtgctgctctcttggccccagtgcaccatctgccccgtgacgctctcccaccgagcccctcttaccctacgcgtgtctgctccccttgttctgtagcgtttgt

SEQ ID NO: 796 - DNA, 422 bp, Bos taurus
  unsure (161),(164),(374): unsure at all n locations; Clone ID: 25-LIB188-024-Q1-E1-G9
ccggatacacgtctaaagtctcaaggtttgccgaggtgatgcaagaagaaagggccaacaagttgaactccctgaaagttaatgaacgggaactcacgtatgtctgacagagacaatcctactccgtaacagcaacaacatcaaagtttcactattgacanganaattaaaaatattctgcctaagagttctcagcatctcatataaaaggttcgtgatacacaattttcctccttgaacacaatcaaagatagactttcatgacagcactaatacagtatagattttaattatatactaataacacaggcctgaatcctaacaattatgctttaatttcaggttaatgtaacctaaacaatactgtcctacanattaaaagcaagcactagtgaatactattaagcaagacatcagataca

SEQ ID NO: 797 - DNA, 320 bp, Bos taurus
  Clone ID: 25-LIB188-027-Q1-E1-G1
atggtaaccaaaagtccaacctggccaaaaaggcaacctttggtccaaaattcttgggagcgactcaccgtccggataaacggccttcatccgtcaaatccctgcgccgctgaacgcctgccgcgcacctcgctggacctcgagttggacctgcaagccactaggacctggcacagccagctgactcacggagatctcggtgctgaatgagctcaaggagcagctggaacaagccaagagccactgggagaaagagctgccacagtgggtgcaggaggacgaacgcttccgcctgctgctgaggatgctggaaaagcgga

SEQ ID NO: 798 - DNA, 416 bp, Bos taurus
  unsure (295): Clone ID: 26-LIB188-002-Q1-E1-G9
acacacacacacacacacacatacacaagtcacatgcaaatagctcttctcagtctctgccaccaacagctcttgccccagccagaaatggccagctcgctgtctgtctgtctgccctctccgtctgtccctcagagaagacacagagttatctccatgctgtctgtggccaggtgcctgcaccctctggaactcacagactgggtcttcctttctctccatttggggaaaggaaccctcaggactgctgccttggcccaccggtcatgctccccaaggctggggcagtcattcncctccaggccctggccgggcccagacacagctttgctggatgagccccactgatgccagagggaaggtctgaggctgctgatgtcttgggctggagctcggcggaggtggcggggctgggt

SEQ ID NO: 799 - DNA, 458 bp, Bos taurus
  unsure (8): Clone ID: 26-LIB188-003-Q1-E1-G5
catgcacncgtacgccatggcggccggatacacacacacacacacacacacatacacaagtcacatgcaaatagctcttctcagtctctgccaccaacagctcttgccccagccagaaatggccagctcgctgtctgtctgtctgccctctccgtctgtccctcagagaagacacagagttatctccatgctgtctgtggccaggtgcctgcaccctctggaactcacagactgggtcttcctttctctccatttggggaaaggaaccctcaggactgctgccttggcccaccggtcatgctccccaaggctggggcagtcattcccctccaggccctggccgggcccagacacagctttgctggatgagccccactgatgccagagggaaggtctgaggctgctgatgtcttgggctggagctcggcggaggtggcggggctgggtggagcgagagc

SEQ ID NO: 800 - DNA, 413 bp, Bos taurus
  unsure (328),(334): unsure at all n locations; Clone ID: 26-LIB188-004-Q1-E1-G9
acaaacttttttttttttttttttttttgccacagactgcatttatttagggatcgttggccaaaggaataatcatttggggtggtttttatctctgtttcttctctggaaccttccacagagagcactgtccaagcagagggtctgacctgaagggatgctcgaggccactgcggcagctgaccagggtccccaggaccagagtctcactccagggggaccaagtccatgctccctcttatcagcctgtcttcctccagggctgtccagtctctttgctggccttcgagccctccatcgtcagccctctgcccaaacagggaggcangaagangactgggaaggcagagggtctgaaacaaccgctacatggatggactcaggacacacaacaaagagagtctctggcgcag

SEQ ID NO: 801 - DNA, 283 bp, Bos taurus
  Clone ID: 26-LIB188-008-Q1-E1-G5
gccatgggggcgggatacaaaaggaatctcactataatgcgcatattcacaacacattaagagggacggatccgattaagtaacagacaagtccttttctaccatcactatacatgctaacaactaaagtacttgtaatcatataatatctatcctacccacgctgttcgcatctcaattgcattccaatgggcaaacacagccaagtgcaaactcagcgatttgtgcacctgttagaggagttccttacctcgacatttgcgtaggcaccatgcaatcaatg

SEQ ID NO: 802 - DNA, 412 bp, Bos taurus
  Clone ID: 26-LIB188-008-Q1-E1-G9
acccttttaacaagagaaccttgtggaaatccagctggcaactcaagaagttcaggaagcaggaccacagaggttatactctgggatcctggccatgaggttggatgcctcaccttgttgaaaagagacactggacctaaatggcgcagcatgactttgttcctgcttggctaaatttctcaacaccccagtcagctaagtcacctacagcgactttcgaaaaacacggagagcacctaccccgaggagatggtagatttggagtaagccgtcgtagacataattcctctgatggctttttcaacaatggacctcttcgaactacaggagattcttggcaccagccctccctgtttcgccatgattctgtggactctggtgtctctaagggagcatatgctggaatcacagg

SEQ ID NO: 803 - DNA, 414 bp, Bos taurus
  Clone ID: 26-LIB188-012-Q1-E1-G5
accatctgattcggatgtcactaccaaaacgggagtgcctcaaacagccagcctccaatgcccagagccaggcccagttgggttggagtatagatttaaaactgaaagcattctgagtttgagggaattcaggttgtaggatttctcatgcctgagacctctgcaaggcatctctaggccttctcctattccctccctgaccacaaacacaaactcacactactatcctcaaatcccaggaaatctcagctgttggggcagtttctcctccttagttttggggacagactttgcctagtatcaatacaaatccagccctttagccctgagactggtggtgtaaaactgatggcaaggtagcaaccacagaccagaaccaaacccaggatttggtctgtttacctgtttggggtt

SEQ ID NO: 804 - DNA, 405 bp, Bos taurus
  Clone ID: 26-LIB188-014-Q1-E1-G9
acaacaaacgactcggactcgagattcatccgggttgttgggtagttccaacgccgagggaaaactaggggagcccaccccaccccaccccaccgagagaatttctacagctactctagcaaggtgctccagctaaagcataggtttcaaactacagagtttcaacttaacatctaaaattttaaactgtagcatttctgcaacaaataagctcagagagctcatctcagaagaaaaattaaagaactattgctctgatgaatgacaagtctggctgttgctctcatgctgcccaacttccaggctcaggcagacacgtactttgtaaatctgaaatagttgttcacaggaagaaaatcacactcgcgaacattttctctagccaatcaaatactcttcatatat

SEQ ID NO: 805 - DNA, 430 bp, Bos taurus
  Clone ID: 26-LIB188-018-Q1-E1-G9
acaaaatggcatcacgctggttccagcaacttatgcaacgtgagcaaggacgggaacgaccactaaaaagatactgtcataaaaaaacagatgctggcaatgaccaagaatagggctcatttttagcacaccatgttagagctgcctttttggatatcatagaaaacagaagacaggcatgacagagccctagtgtataaaaggaaaaacttggctaatgcgaggtagcaaacaggatcagtttatgagtcagaaatgtgatttgtgaaaattcagttctacttgtcaaaaagtattgaaactgttacttttcactgaatgggaaagagtgaagccagaaaagttacaatgatcctcagacttaaacaggttatattagaaccattcctaaatacaagaagttagggcaaatcctctgttatataattgt

SEQ ID NO: 806 - DNA, 413 bp, Bos taurus
  Clone ID: 26-LIB188-026-Q1-E1-G5
ccgccatggcgcgggatacacaaacacacacacacacacatacacaagtcacatgcaaatagctcttctcagtctctgccaccaacagctcttgccccagccagaaatggccagctcgctgtctgtctgtctgccctctccgtctgtccctcagagaagacacagagttatctccatgctgtctgtggccaggtgcctgcaccctctggaactcacagactgggtcttcctttctctccatttggggaaaggaaccctcaggactgctgccttggcccaccggtcatgctccccaaggctggggcagtcattctcctccaggccctggccgggcccagacacagctttgctggatgagctccactgatgccagagggaaggtctgaggctgctgatgtcttgggctggagctc

SEQ ID NO: 807 - DNA, 102 bp, Bos taurus
  Clone ID: 26-LIB188-027-Q1-E1-G5
atgggcgcgggataccttttgcagctttgggataagactgttttcctgtttagattttaagcattgccagagagaaaaaactgttccgttcttttgattgtg

SEQ ID NO: 808 - DNA, 227 bp, Bos taurus
  Clone ID: 26-LIB188-027-Q1-E1-G9
acccccatggggtcaggagatgtggtctggccagcctgagccactaggcctctcctctctgcataggataagccccagagccagggcctgatcagccctcccagtccccctttgtctagagggacaaaggtcatcctaaccaggctgagcctgtgacttattaaaccagtttagttctcaagctgtgcaggcaacagatgccagtgggctctactggtctgtctagt

SEQ ID NO: 809 - DNA, 390 bp, Bos taurus
  unsure (313): Clone ID: 27-LIB188-003-Q1-E1-G11
gataccaacagtacttacatcatggggttgtcctgaggaccgaaagaactcatacaggtaaagcactttgtaagtgcctggacacatcgttagctttctatataataaaaatatgaaatataataccctttccaataataaagggtaacaattattattatgctgcgcaaccttaagcaagttgctttagttctctctgtctcagtggtcatctgtgtaatggagctcctagtaagtatccacctgtgttttgtgcaaattaaatgagtttatacatggaaagggcttggaatagcatcagacactctatgtntgctgtgatgatgatggcaatggtgatgatttaatgggaaactgtaatgtttccttcaaccagccgaatttctgggt

SEQ ID NO: 810 - DNA, 423 bp, Bos taurus
  unsure (346): Clone ID: 27-LIB188-005-Q1-E1-G11
tcccgtacgccatgggggcgggatacagcctgagactccaaggctgggcatcaggagcttctgcttcacagcccactgagacgtgatggggccgcagggtgggccggccagaggctcggaagaacagagcagccggctcctcgaggcacctacgtgcagcagtgtcgcatgtggaagttgacgacatactcagcattagtcctctgcacagagatggcaaaaggctcgaaagggtggaaggtgaaggcaacgaggcgtcgcaccgtgtggttgatggggcggcccagtaagcccgcctgaatctcaaacttgagcagaccagagtcccgggcgtagaacctgatanggtggtctccgcaagtcttgggtcgctccatgaccgacacccacttgtcgtcgtagctaaagagagacaggtcaagg

SEQ ID NO: 811 - DNA, 388 bp, Bos taurus
  Clone ID: 27-LIB188-007-Q1-E1-G3
acgacttaataatgaaaaagccagttcatgacatgttgtcattagaatcccagccatagcatttgaggaatcaagatggatcactcttgacaagcagcaggtctttccaaaataccacaggaagtgaaagttctcagaaaccaggggttttgtaagggaatcatcataatagctaatttcctaacgaaactggccaggtcgatgtcttctagttacatttgagaaaagccactatgttgcttcttgaaatttccgggtttggatgatcttcaaagggagacaagggacaccctgaaaacacaagacatctgctaatcctgaaatgtccaaagaaacctgaagagatttcagacaacagcctgttccctgagcaaagacaatgcctcca

SEQ ID NO: 812 - DNA, 264 bp, Bos taurus
  Clone ID: 27-LIB188-009-Q1-E1-G11
tggcggccggctacccgcacgagaaaacgcgatcgcaacagatccccattgctttgccctcccagctcatcacttgtgtattcactgatgagaaagtcacaggaaacaagatgtgaatctgtcggtctgtgcactagttgcagtcgcactgtgtgaacactgtctgcccaccgggggaagtcctatctgctgctgccacaatatattcatgctgcttgtgaattgcacggacttgatttgacactgggacccactgtaatgtaa

SEQ ID NO: 813 - DNA, 409 bp, Bos taurus
  unsure (336): Clone ID: 27-LIB188-012-Q1-E1-G3
acaaatcaaaccagggccctccaagtgaaagctcttcctgctcccactgctccccagccctgtcccaacatggcagatgtgggaaagcagcaggcctgaagcagaggaggttctggctgtggtaggcagtgtcacagcaaccccagtcagtgatcacagagtcacctgggttagaagtctaggtctcactgtcaaggacaggagtaggaaggtgaagcggcaaaggtggtctgaaggtgctcatgattttctcacagtctgtgggggaggggaggatggcaagactgtccctcaatgccaaggatgaggcatacgggtggaagcagaggctcctgngcagctgctccagagcgcttcactacagtggggagaaaaacaatcccttggacacactcacttgcaactccct

SEQ ID NO: 814 - DNA, 381 bp, Bos taurus
  Clone ID: 27-LIB188-014-Q1-E1-G3
acatatgtcacctcccagtatagatttctttatacagtaagttataacaagtgaccacaggtgtagaactctgtttaagtctaagctgccttttcagtgtgaaactagtgttcctagccagtgatggccaccagtgaagtgttaatatggacacaagaaccaccagagtcaaacgcattccgtataatttgaagtccgtggctgtagaaagatacttatactctgatacagttcagtgggatttaaatttggactagtttcaaagactaagggttaagaggttccattggaaagcagggagttaattagggttgagaattgatagtttttatgaggtgccaaaagtggaatctgatacagtataataaaaataacctggtt

SEQ ID NO: 815 - DNA, 169 bp, Bos taurus
  Clone ID: 27-LIB188-020-Q1-E1-G3
cctcctcaaaacgggtccggggaacccggtggcccggaattcctcaaggaaagcaacaagttatttcaaaaacggctggaaaatgtccaaaaatatgtcctgggccctgccgaagttagcaagggaattcaagccttaagcaagccccctggaaccctcgcaagagcgg

SEQ ID NO: 816 - DNA, 375 bp, Bos taurus
  Clone ID: 27-LIB188-021-Q1-E1-G11
tggcggcgggatacgctggtcacagcgccccccaagttgggctcctgtcggtgtcttaggtgagggttccccatcgccccccgccccccacaggggctcaaaagtatcaagggaatggcggccacctgattccccatggagacaggcaaacggattttgactggcggccccagcggtcactggagccctgttccctgtgtcgtccaactatcaaggatgtgcaatgtcacatgtccatccatagcccaggcctgggggtggtgagtatcaaaaggaggaaagaatggtttgtgaagacaggcacgagatatatatatactactatgagtgtgcagttctaaaccacagttgcaggaggacacaggtatgattgtg

SEQ ID NO: 817 - DNA, 448 bp, Bos taurus
  unsure (292): Clone ID: 27-LIB188-024-Q1-E1-G11
ccggagccagggcccagtgctgatgatccgcagaaccagagatgagatcatcaccaccacggttcctgaggacatcatgtcgaaccgaggcaatgacctcctgctgaaattcctgcagcatcggtatccccgggtgatggcggaggagggtcttcgagtggtgaggcagtggctggaggcctcctcacagctggaggaagcctcgatttacagccggtgggaggtggatgaggactggtgcctgtccgtcctccgctcctaccaggcagaacatgggcctgaattcccctgnagcgtgggggatgacatgagtgcagacggaagatggcagctggctttgtttctggctcagaagcatctgaataacttcgaaaccacacactgcaccccactctcagcccagatcttcaagatgccctggcacctctaaggaacacactgggactca

SEQ ID NO: 818 - DNA, 374 bp, Bos taurus
  Clone ID: 27-LIB188-028-Q1-E1-G3
cgccatgagcgcgggatgaccggtgtgaaaaaaaatgcacacagtacgttgctgaagacaacttctaattagacttctgattcttctttgttataatgcaaagtagccaagaaatcaacacattcctactatttcaatcaccctccatgagggcgaggccttggccctcctgtggcaggacggtgtccctggtgcaacctgagctgggcaaactggtggcagatggaacagtctggcctccctatcactaccatgtggaaatccaaaactttggtttttgtttgaaggacatgtaagtccatgtttatttatctgcttgagggaaggtagtagcaaaggtgaaaagcagaagctcttcctattttagcagttct

SEQ ID NO: 819 - DNA, 386 bp, Bos taurus
  Clone ID: 28-LIB188-004-Q1-E1-G7
acttcgagacactgagggggtaagaagcgacaggtgggtgccaaaggggctgcccagccacagtctttccgtgtcgtcctccgagcctgggtggcagaaggcctgggcatagcgccggacacgctgctggttgatatcctgtttctcttccacccgcaggaaccagcggtcccccagcccaaacttgtgcccacagatccccgagcgaggccataggcaacgcggcagcttcttctctagcatcacagtggtggctacaacctgcgctctccagagctcatcccgctcgtgggctacacgccagtgagtgtcacccatcatagcgatgaggaggttgagcatgagcaaagcagcgatgatggcgaaggcagcgtaggtgatgctgt

SEQ ID NO: 820 - DNA, 409 bp, Bos taurus
  Clone ID: 28-LIB188-008-Q1-E1-G11
acagcatcacctacgctgccttcgccatcatcgctgctttgctcatgctcaacctcctcatcgctatgatgggtgacactcactggcgtgtagcccacgagcgggatgagctctggagagcgcaggttgtagccaccactgtgatgctagagaagaagctgccacgttgcctgtggcctcgctcggggatctgtgggcacaagtttgggctgggggaccgctggttcctgcgggtggaagagaaacaggatatcaaccagcagcgtgtccggcgctatgcccaggccttctgccacccaggctcggaggacgacgcggaaagactgtggctgggcggcccctttggcacccacctgtcgcttcttaccccctcagtgtctcgaagtacaatattgaagacaccaccgat

SEQ ID NO: 821 - DNA, 354 bp, Bos taurus
  Clone ID: 28-LIB188-009-Q1-E1-G7
cgccactggccgcgggatacagattcatttttaaaaaggtatctgccacaactccacaagccaatcaggcattcatcagagctgccgcctctgtgtgggtgctgcaggaacaccatataatattactctgcaaaatagtctctttttctctttaagacaatacatgaaagactctcctaaagatgtttaatatattcttatataaaatatcagatgttgatataaatcatgtaaaccttcctttggaaaagttacaactggtcctcatttgcaagaccacaaaccttgaatttttaacatgtcagtgcatatctgtagtaagtgttttcacattacataaatatggatcaaccc

SEQ ID NO: 822 - DNA, 455 bp, Bos taurus
  Clone ID: 28-LIB188-010-Q1-E1-G11
catgctcacgagcgccatggcgtcgggatacttcgacaagtgaggaacttgtctttaaagcaccttttcttcattattttaaatagctgcctcagcagcatggggtcctgagtattaatgttggcatcgcccacctgaccatcctcatatacagctaagaaccgtgtgcagacatggtcggacacagggcacacccagatgttcccatgcttctggaggtccttggatgtaatcacttcacaaagtgctatacagtttagattccgactctgcaggaaccttgactgaatggatccggtctgggggatggtattcattctgttgtaactctggacgagctcatctttggatggcatcctatgctgtccatttcccattcctgcagtttggtgtaagatgcattgaccatcccattgcagatgatcgaatgccaattctcaatgtgggacccattg

SEQ ID NO: 823 - DNA, 393 bp, Bos taurus
  Clone ID: 28-LIB188-011-Q1-E1-G7
acaataaaaacgcctctgcagcttaagcctctcatagaccctagacccctgacagaaagctaggcaaagcatctctcctgcaaattaagcgggtttccagtattcccatgtagacgagccttcagagacaggcactcaagcatatctttagaatataccatcttggctctggctgcgttaattatgcctgaagagtttaattcccatccaagtccaaaggtggaagaacacataaacaggtatggtaatcggcaagagcagactgtaaaagcacagactggtggtgctagtgcagccctgagggaagtcgtcttccacagaggctgagtaaaacagtcctgctaaagataccagtggaatcaggacagtcagcataggaagagacagaaacat

SEQ ID NO: 824 - DNA, 397 bp, Bos taurus
  Clone ID: 28-LIB188-014-Q1-E1-G7
gccgagccgcatgaacccgatcgccacggccgcgggatacctggagaagatatttgtggttgttccgcctccctccccgttgcttttaattagagacgcagaattgctgaagaatggtctgttatagcagttttatcagatgttgtatttgggagtgggcaacatgtttgaacatgctgtatattgggagctcagtcttgggtggtcaggcataatggaggatcctggtgatgacagatgacattgtcagccaatccccacatgggagtgaggacatgtcctgcaattctgaagggattctctggcatattctcggccaagggcttgccgtttatcaaagtcatatccagggttgtgtgggtaacacagctccattgggtgaggaactgggctaagg

SEQ ID NO: 825 - DNA, 419 bp, Bos taurus
  Clone ID: 28-LIB188-015-Q1-E1-G7
acatgattatgcagaaacaggcaagctcacactggaagattaactatctcagtcaaaattccgcttgtggcccccacttcttgatcgatttctattcccacttcgtcttctaccatcttgtcgacttcctgtccgactcccctgccgactctgtctacctgaccggccaccggatcgaccacctgaccggcctgaccggcccaaccggccgcttgaccaaccactcctctgtctggaattagaagatgtgtttccatcataatattcttcaatttcaggcaacttggctggcactgagagtatccagtctgaatcatgccactctgcctgtaacctttctgattcagttgtgggaacatcaaagcaaacacccatatttccttttaggaggcacattctggtaatctgggacacagcat

SEQ ID NO: 826 - DNA, 446 bp, Bos taurus
  Clone ID: 28-LIB188-018-Q1-E1-G7
acatgaaaaagagtagaagttttaaaaattcttcaggagtccaagctgggccatgactattactgatggggtttactcaaggcactgattccaagtttgacgaccatcaccaaactggcacctgcaatcaggcctgctggcatgaattttctacagttgtagaatctcatccccatgatgccagccaaggttccagatgtgactaagaaaagccaaatgttcttcggatcctgagacagctgatatgaccccaggccggctagaccaccgaagaggagcccggcagccagggatggaacactgcctgcttttgcatagccaataatcccgccggaagcaaccagtgctgcatagccaaagccaagccagtgtaaaggcactagcgggccggagtccttcggcattgttctttcaccttctccaaaccaggcctgtatcactagtgc

SEQ ID NO: 827 - DNA, 386 bp, Bos taurus
  Clone ID: 28-LIB188-019-Q1-E1-G7
acatttttacataacattttgaacaaggtttatattgactcaagtttaaaaacaaagtgtgactgaaaaatttttacagagtctagtgcaccaatgctgatgtgaggggttgtgtatgcgagtgaggaaaaaatgtgtattctggtggcctgaagctttactggacaaggatgtgtgaacgtgcagagatatatttagtgacacagtgtagagaggcaaaaagaaaaaaaaagtaaaaattccaaatgtatattttttcttattgcccttcccttggcccccaaattatcacttcctgttactatattacccttgttattaggaactctaagccatgcggagcaccacccctcttcccccgtcagcctagatgccgccctcggttc

SEQ ID NO: 828 - DNA, 432 bp, Bos taurus
  Clone ID: 28-LIB188-020-Q1-E1-G7
catgcacccgagcgccatggggccgggatacttcagtagaactgaggatacactgaaagaaaacaagagaaaaaggtcctctcagcctctgcagcaaggagatggtcaggatggagcgtgctggttacgggtagaggagcaggggcgggacctcacgactggcaatgaggagaggatttggccaaaggatttttttaattcttattagaaaagtatcatttataaagtatattgatcttgtatcttcatttattataaagtatactgatcttgaatcttcctttattaaaaataagctccttcacaaaaatcaggatgctacagaagaggaaccagcacagcctatgactggctgatacttaactctgaagaatgcaactttcatactgagaaggatttctgagcttggtattgacctgcttggcccaactc

SEQ ID NO: 829 - DNA, 413 bp, Bos taurus
  Clone ID: 28-LIB188-023-Q1-E1-G7
catggccgcccgatacatgagtcacaagatgcaagttagacatttctctcttcagttcccagtatgcactttgcatattgtcacttgaaacgctcagtctctgcagatctctgcagttcagattgtcatccagagatggatccgtttgtttggctttctgcagctctattctgagatctctacattctttcctcagcagttccagttcctgttccaaaccatggatcttcaggtcgcagcttaacttttccacctcccagtttgatgaaggaggatttaaatttcttatcacctgctgagtttccacctctgtcctcagctggaggagttctacttctttagattgtagctgttcattcaacactttcaaagattcagagttgtctttattcattttatccagcttgcttttc

SEQ ID NO: 830 - DNA, 352 bp, Bos taurus
  unsure (51): Clone ID: 29-LIB188-003-Q1-E1-H9
agagagctcaagggagggaagtccagactcagggcccagtcttctccacangggagaggacacagaagccaaatgagctgtgcgtcatggagcaaagagagagagccctgagctgtgccctggaggccagggcacttggggttcctcctgctggccaggccactggatggcggcctgcctgccccccacagcaggcagtccctgcctggtcagaccctttctgcattcactgttgcacatataaggcagctcaatgtctcctgctaactgggctctatgagctccagctgctggaggacaaggaccaagcatctgattagaatgtgaggtgacagggcttccaccctggggt

SEQ ID NO: 831 - DNA, 86 bp, Bos taurus
  Clone ID: 29-LIB188-005-Q1-E1-H1
gcaatggcggcgggatacccaggcggtggtgagccagaggccaagcgtgaggcagagcagcaggcggccggggtgcgtgttcatgt

SEQ ID NO: 832 - DNA, 363 bp, Bos taurus
  Clone ID: 29-LIB188-005-Q1-E1-H9
acttcagaaaaactgaggatacactgaaagaaaacaagagaaaaaggtcctctcagcctctgcagcaaggagaatggcaggattgagtgtgctggtttacggtagaggagcaagggcgggacctcacgactggcaatgaggagaggatttggccaaaggatttttttaattcttattagaaaagtatcatttataaagtatattgatcttgtatcttcatttattataaagtatactgatcttgaatcttcctttattaaaaataagctccttcacaaaaatcaggatgctacagaagaggaaccagcacagcctatgactggctgatacttaactctgaagaatgcaactttcatactgaga

SEQ ID NO: 833 - DNA, 347 bp, Bos taurus
  Clone ID: 29-LIB188-011-Q1-E1-H9
atgctgccgtacgccatggaggccggatacgtctgagatctgcacaacaggatagctggtacgaacatttgctgcaagaaatgtacagacgtagatctatcatatacagtgtggtagaacatcttgcatcgagcaaggatgttagtgcatacaccggtgaggagcacatatgagtcttgccatgtcacatcaatgaaggttggagtctgtgacttgacatccaattgggcaagctggacacaggagagtcatatggaagagtgcatggtatgactgcgccagaggtgtctacttttggtagcgtctacacacggaaaagggccatgctctacctacctaacaatgtc

SEQ ID NO: 834 - DNA, 416 bp, Bos taurus
  unsure (60): Clone ID: 29-LIB188-015-Q1-E1-H9
gtgccgaggctcatgcggcggacgcatggagcgggatagtcacttaatggcataaagcanaacagggtccttggcaaaccgtcagcttaaacctgggatgctcccaaacacggtctaagccccgcagacctcgccaccctccacggctgccttacgcgccctctcacaccactctccctcttctgacctgatagtcatgtgataggaattgaaagttttgggccagcacaaacaaagtgaaaccaaaaaataaatagaagaggaaagcaaatgaacacgaatatgagaacttcttgttcttcaatatcacgggttattttttgttgttaatgttttataagtaattttccctacttgatttttcttttataaaatctcatagaacagtgtttatgatacagccatttaatatatgt

SEQ ID NO: 835 - DNA, 432 bp, Bos taurus
  Clone ID: 29-LIB188-017-Q1-E1-H1
gccgccggatccatgttcaacacctggtcattgagccagttctgtccatacaaagttcccaggtcatccatggtcagcacatgccgcttataggtgactcggaagcccctcaccatggcattgcctggcatccgctggtatgactggatcaactgcagcaccaggcccttcctggaaggtgcagagaactcctgctggaaaatgtcctctagtttctccactacctcatcagtgctgaggggtatgaggctgccgtaagtctgaaggaattcatccaagatgctctgcacacaggtgacatgctcctcccgcagagggctgtgctggccagctttctccccaggcctctcagcctcttctgcagtgcccacatctgagccctgaaaaagctcctgggccacgtggtccccgatgctgcacacgttgctgatg

SEQ ID NO: 836 - DNA, 476 bp, Bos taurus
  Clone ID: 29-LIB188-017-Q1-E1-H9
ccgacgctgcatgcgcccgtacgccatgtacgccggatagactgaaaggccatttcctttcaaaaaagttcatggaatccaaaaatccaacttggaacaaaacctttgaagggaaacccaatggccccttcttgagcaaaacttcaggcaggaagggccctggcctttcaaattcaaaacctggggtgttcagaccaaatgtgatgcggaaagaccaaaacctgggttccacagtggacatggatcagtgcaccactggggttacttgaaagactggagggaggggagccccctgaagacagaaggaaataggagacggtctggagaggtcaatagcccatgaccctgtgacagacccctcctgccaccagggacatgtgtcaggttcagacccacatggcgccgccttgcttctttaagtggacccttcagcatcgtgcctggtgtcccttgggaagaagctgtctgtctggctc

SEQ ID NO: 837 - DNA, 395 bp, Bos taurus
  unsure (358): Clone ID: 29-LIB188-023-Q1-E1-H1
catggcagggcgataccggcacatgagtgccccaagtcggggctgcttgcataagatgcagtagacgccagccaccatcagggccaggatgcggttcatgagcaccaggaactgagagtccgagaagcgctcgcctggtgacgtggccgtggccccatagctgcgggtcatcactctttcctgcagcactccccacgtcagataagacacctggagccccgaggcacagaacagcagcttcagggcctgccaagtgggactggtctccgctggttctgcccgggcagccaggggaacctcatccggggccttgggctcattgccaaacacacaagttttcaccagggggaagcagagnaccctacctgtttccaggtagttcttccgcctgaagt

SEQ ID NO: 838 - DNA, 403 bp, Bos taurus
  unsure (320): Clone ID: 29-LIB188-026-Q1-E1-H1
tggccgcggcatactggaagaaaaaaggtttccccaggaaaaatcatagggaacagggaagaaagggacaagtcagtggcagattcaagatgaaagttcaggggtctttaatacactcctccgatattttcattactgctttcccccttgtgtagcattcaagacaaacagtatcatatcctccctgccagattcctatccctgagtgactgggaggcagaaactccagttcattatgctacacccaatgatacatccggggagcgggctgcggtccagttatacgagtgtcctagtggggtcgccaaggcccgagtcanccctgaactcatcgattccttcaagttgatctgctgacgcctgaagacttgacactgtctagccagactcacaggatgctgac

SEQ ID NO: 839 - DNA, 309 bp, Bos taurus
  Clone ID: 29-LIB188-028-Q1-E1-H9
gccataggcccgggataccccaaattcccgcatgtgatcagtctagacttctccctgcttcgagatgatgtgagcacccctcctgggtatctggcatgtgtacagaagctcgggcctttccctctcatcgcccttctcccccacagggtgagtggttgctactcttcaacagaatccacgccttcttagacctgctgaggcagatggcagccctgaccctgacccgcaccgccccaaggcttcacgtcactgcgcgcacagacacggtatacaagttcctggtccagctcaccatggacttcaactcgt

SEQ ID NO: 840 - DNA, 350 bp, Bos taurus
  Clone ID: 30-LIB188-001-Q1-E1-H9
acataaaagatgccaccaccaagtagaaatacacattttcagacatttttatcaaagccattaaaaagtatctccaccattatcttgtccttctctcttaatggcttctgaactttgtaagcaaaggacagccttaagtattttttgagatttctcacaatgcacttacataaaagtatgcaaagtttgaaatttcttcagaaaaaaattacaaaaacttaaaatatacataaaggagaccacacaataagtttcttctttgttttagtcgctttatgtccaacttgcaaccccatggactgtagcctcccagattcctctgtccatgggatatcccaggcaagaatact

SEQ ID NO: 841 - DNA, 405 bp, Bos taurus
  Clone ID: 30-LIB188-006-Q1-E1-H9
gggatacaatgttacttctccacaaacaggatggtaattaatcatggttcctcttctccaatgtatcagatttaagttaattttatgacttacggagctcaagcctagctggtctgaatgaatcaagcactgaggggtttggggcaaagctcagtggagaagaggccctaggtctgggctccaggtcctacctgtgtcacctacctgctggctgactgaccccgatcctacaagtgtcaggtttccaaggctgcttttgtctgtacaagatcaaactactacaatcttactttgctagtaatatatattttttaatttggggatacacagtttcaaagttttctatgcaaaagaatgaaggtaatagggcttaattacatactgcacactgagactggaactgtt

SEQ ID NO: 842 - DNA, 326 bp, Bos taurus
  Clone ID: 30-LIB188-014-Q1-E1-H5
acatatatatgatttcttgtacaaattgattttcttctgtttaattttatggtttttattatcatactcttgatttttctaaatttctgtgtgtgagaatataacattgattgaattgcagttacctttggctagtaatatttcattattttaataaccatgatgccacgtatggatttactttgggtttcaaatcaaaatgtcactgccagaaagagccgttccagacgagcctagtgcctcctgtgccccggcgtgtccctggaatcagctgacttgagagtggtgcaaggaattctcaccagaagtgcacagaccacttgtaa

SEQ ID NO: 843 - DNA, 277 bp, Bos taurus
  Clone ID: 30-LIB188-014-Q1-E1-H9
catggccgcccgatacattgatcagtgcacttctggtgagaattccttgcaccactctcaactcagctgattccagggacactccggggcacatgaggcactatgctcgtctggaacggctctttctggcagtggacattttgatttgaaacccaacgtatatccatacgtggcatcatggttattaaaataatgaaatattactaaccacaggtaactgcaattcaatcaatgttatattttcacacacagaaatttagacagatcaggagtatga

SEQ ID NO: 844 - DNA, 324 bp, Bos taurus
  Clone ID: 30-LIB188-016-Q1-E1-H9
acccacagggaacactaccattaccagaggccaagcaatcacccactaagtgcgacacctgggcctcaacggcatcttcacgcatggcctacagagtccctgctaccaaacagtcggcaaccattacgaccggtatcgatgtcactacttcactagttcagttgccatacagattaccaacttgtcagttcggtacacgtttacgcgggtggctccaaccaataagacggttatgagtaacactacctttgcgatcatcaactcgctgacggcatccatttgatatgtgtgagaccacatgtcaatgacactaattcaatcaca

SEQ ID NO: 845 - DNA, 393 bp, Bos taurus
  Clone ID: 30-LIB188-019-Q1-E1-H5
actggtccatgcgcctgcaggcccagggtgggccctcccctctgaagagcgactcggtcagtgcgaggctccccatcaacgcgggcagcacctcgtccagccgcatctaggccgccagcgccccccgccagtgtgaagaagcagagtcacctgtctctcttcactgctacctgcagcccctgcagccaggcccaatcctgggtgggccacctgaagacttgagaaggcccaaggaccttggagggatggggccgttgccatggcagccaggaattcccaggctgggtcttctgactacttgcctcttgggtccatctcaggggacccatgagtgggactgaaggctagtcttaatgcaccatcactggggccggcccttggagctgggggttg

SEQ ID NO: 846 - DNA, 400 bp, Bos taurus
  Clone ID: 30-LIB188-020-Q1-E1-H5
actagacaaaccagtagagcccactggcatctgttgcctgcacagcttgagaactaaactggtttaataagtcacaggctcagcctggttaggatgacctttgtccctctagacaaagggggactgggagggctgatcaggccctggctctggggcttatcctatgcagagaggagaggcctagtggctcaggctggccagaccacatctcctgaccccatgggggtacttttttttgccaatcaagttttgtgtatgaaattctaaagaaggttaccaaagaagagcaggtatgataacttctgcccagaagcagcaggccgcagtgccctggggagcccttcaaaggtcaattacaattgtgtgcaaacagaagatcccggtgaagccacagcctgct

SEQ ID NO: 847 - DNA, 416 bp, Bos taurus
  Clone ID: 30-LIB188-023-Q1-E1-H9
atggcggcgggatacacacacaaacacacacacacacatacacaagtcacatgcaaatagctcttctcagtctctgccaccaacagctcttgccccagccagaaatgaccagctcgctgtctgtctgtctgccctctccgtctgtccctcagagaagacacagagttatctccatgctgtctgtggccaggtgcctgcaccctctggaactcacagactgggtcttcctttctctccatttggggaaaggaaccctcaggactgctgccttggcccaccggtcatgctccccaaggctggggcagtcattcccctccaggccctggccgggcccagacacagctttgctggatgagccccactgatgccagagggaaggtctgaggctgctgatgtcttgggctggagctcggcgg

SEQ ID NO: 848 - DNA, 434 bp, Bos taurus
  Clone ID: 30-LIB188-025-Q1-E1-H5
accgctcctctgcatgaggtaagccatctcccgagtgccaccacctgcacgccaccccagcactcttttattaaggcagtttggttctagacaccttggtgcttttattggtgactttctagcccatggcttcttagccccaagcaattgaccatttctaccctgccttgctctatgacgtttctgcaactttttctacaaaggtaatgcctccccctcagggtcaaccagccctgaaacattccagggagaggtgtagccaatacaccagtgtggctttataacaacagccattggagggtcttggtattgggggcccactgccatcctcacccccagcagctgtcaaatactctgtcccagtgaaatgaagcaagaggccgggcaagttcccaagtcaggaccacacctcaatcctcactaccctaaccctg

SEQ ID NO: 849 - DNA, 374 bp, Bos taurus
  Clone ID: 30-LIB188-027-Q1-E1-H9
accccgtatctagctcctctccccaccacaatcacagcagtcagataaagttgaggagtttattagggaaatatgagaggtacagacaccccaaatgacagacaagaaactctgaaaaatgtccttttcaagccaaattgggggctggcctttaactccccaaaagggcaagaaactggtgggttaacaacaacattctctggcagccaactcaacaagggatctcaaccaagaatgcttcctaaccccaaccaaaggtgggaataagacaaggactgtttaaaaaatcaatggacaaggaatgagagctataaggaaagactgagagagagagagagagaggtgtggaagaccttgtcacagtcccagatttt

SEQ ID NO: 850 - DNA, 371 bp, Bos taurus
  Clone ID: 31-LIB188-007-Q1-E1-H11
gcaatgggcgcgggatacccagctaagcattcgggatgcacacgtgctgtaaagaccaaggattagactacccactttatttcaaggaactcgcaggttaaagtctacatgcatccctgcacttctaaagatatctaacttcccagctgctgcaaggctatgatacgctgggtgcctgtccacatgtatgcttggtcttactggtcagatgtatacatcaatcctataccatgtcttcttgaacatcaacggaaaggttaagatacacatgcatgacactcaattcatatgttttcagactaatgttctcatgcacctcagtcttcacacttgagatacagattggtggttgttcgtagccacatcattta

SEQ ID NO: 851 - DNA, 408 bp, Bos taurus
  Clone ID: 31-LIB188-010-Q1-E1-H3
acctcgagtagtgagttgagcatcctccttgttgaacttacgtctccctgtgcgaatgcgtctgtgtgagctgtgaaattggtatgacttcagcaagcctcatttcatctggaaggtcttgtctttcccccacttttcctccagtgtggcatttgtgtcatctgcagcacgagtgggaagttggcaaagacgtggtgattgaaatgcactattggccaagtcccggttgtcaacttccagagtcttgtttaccaaagacagggagcagaggcccatgcgtgtttgatcctcttcttccttctgctgtgacctttggggccatttgaggggacagttggcaactggtccgccagggaaagcactgctcttgtaagtctctgtggtcttggaaaaattaacctgtatcac

SEQ ID NO: 852 - DNA, 419 bp, Bos taurus
  Clone ID: 31-LIB188-011-Q1-E1-H11
ccgaggctgcatgcggccgtacgccatggaggccggatacttcaggcagaagaactacctggaaacaggtaggggtctctgcgtccccctggtgaaaacttgtgtgtttggcaatgagcccaaggccccggatgaggttcccctggctgcccgggcagaaccagcggagaccagtcccacttggcaggccctgaagctgctgttctgtgcctcggggctccaggtgtcttatctgacgtggggagtgctgcaggaaagagtgatgacccgcagctatggggccacggccacgtcaccaggcgagcgcttctcggactctcagttcctggtgctcatgaaccgcatcctggccctgatggtggctggcgtctactgcatcttatgcaagcagccccgacatggggccaccatgtaccggt

SEQ ID NO: 853 - DNA, 230 bp, Bos taurus
  Clone ID: 31-LIB188-012-Q1-E1-H3
cgccaaggccgcgggataccatgacccctgacaagacagggcagacacacgtcgtcaaccctttactgatcgacaccgtcagattttcacaagctgattttctggccagaaaaccaatttcgtcggctgaggactttgaggtttttaaaaactcttgtgcccgggaggaacaggaacctgacggctgcaaggctgatgactacagtcgggatcaggacgaggatgaggac

SEQ ID NO: 854 - DNA, 273 bp, Bos taurus
  Clone ID: 31-LIB188-015-Q1-E1-H3
cgccaaggccgcgggatacatatactttattgcatgcactgtgaccttggggggagatcggaacgtggacaaagtggacgacacccccgcacctccctgcgatctggctggcttggatctcgtttttaaaccccttcctaccccgcctgccctcgagatatcgcctgtgtgctgctctcttggccccagtgcaacatcagccccgtgacgttctcccaccgagcccctcttaacctacgcgtgtctgctccccttgttctgtagcgtttgtaa

SEQ ID NO: 855 - DNA, 266 bp, Bos taurus
  Clone ID: 31-LIB188-017-Q1-E1-H11
ccatggacgccggatagacatttaaggtaaccaggctagttccaacaatttcggggggaacaattgacattggaaaccaagcctccttgataccgggtcccccagttggatttcttgcttaggggcaggcctcaagccccaaacccaataaagcccaaggtgttgttgaaaaggttcatggccttgaaacaacccttaataaggttgaatttaaggccaagcctcaaaaaaattttaacaggcatttccggcctggctaaaccaat

SEQ ID NO: 856 - DNA, 410 bp, Bos taurus
  Clone ID: 31-LIB188-019-Q1-E1-H11
acaagcttttttttttttttttttttttttttcgccagacaggggtaatgcttttatattagtttttctgtaacaagaaaaatcagctttgaagtttttatcattttttttccttaaaaaagaattaaaaaaaaaaaaaggcacccagaactcccctcaggctcaaagaataaaaaagttctctcatcggtgcagctgggcccttcgctcttgctccacccagccccgccacctccgccgagctccagcccaagacatcagcagcctcagaccttccctctggcatcagtggggctcatccagcaaagctgtgtctgggcccggccagggcctggaggggaatgactgccccagccttggggagcatgaccggtgggccaaggcagcagtcctgagggttcctttcccca

SEQ ID NO: 857 - DNA, 88 bp, Bos taurus
  Clone ID: 31-LIB188-024-Q1-E1-H3
ccatgaccgccggatactcatcttaaacgaagattctgatagggtacaaccgtaaatatcagaacgtcttctgctgagcaatccgtca

SEQ ID NO: 858 - DNA, 461 bp, Bos taurus
  unsure (7): Clone ID: 32-LIB188-001-Q1-E1-H7
atgctcncagcaaccatggccgcgcgaacaattggctataactgcttttaaaatgaaaagccgtctaattctgcttttcttggattaactccatgtttagaattggataaatgttactgtttattgaacatcaagctcttccaagcattttgttttccatgattcattttggttttttttccccctcagatatgaagcatcgacaaatgaattgattaatgacgagttaggaatagcctatccaattattgatgggattcctaatatgataccacaggcagctaggatgacacatcaaaataagaagcaagaagaagtggagcagcattagatcatacttaataacaacacacacaactaaatattctaaataccacctaccttttaaaaagtcagagtggcgggtattaagtggagaagaatgtttctgtctcttcctatgctgactgtcctgattcaac

SEQ ID NO: 859 - DNA, 359 bp, Bos taurus
  Clone ID: 32-LIB188-005-Q1-E1-H7
acaaaaattttaaaacagtgcaaaagcaatatgtgcagtgtattgtatctgacattaaaagatgtattattctgcacatgatataaaacagtcaacgtaggtgcctgaaactctaattctgaagtaaataatcacatgccagaaagctcctcacaggcaatggagtgccaactaagctggagtccgaggaaacatagctagttgcccagatgtcctggtaggcactcatttctcatcagaggggctgcagctagagctatcaggctgtgccacaatcaaaagaacagaacagcttcttctctctggcaatgcttaaaatctaaacaggaaaacagtcttatcccaaagcagcaaaaggt

SEQ ID NO: 860 - DNA, 398 bp, Bos taurus
  Clone ID: 32-LIB188-007-Q1-E1-H7
gccatgggcgcgggatacttgtaaacaagtatgtaaaatggtattccctatttataggaaatgtttacagaaaaaatatagctagagggatcaaactagagttgatgtgaaggtcatacatttttatttttccattctcctctttaaaccttccctaacactgcaaccacataaagttgaattttagaactggtagaatttctaagtgtggctcctaactggcagcatcacataggaacataacagaaatgcagtctttcgtatgctgctccacacctgcaacattctaggggtgaggccagccacgttttaacaagccttccagtaacactggcgcagcacttggccttccttcagcctgtgcataatctttaccagtctcttctgtaaaaatttca

SEQ ID NO: 861 - DNA, 415 bp, Bos taurus
  Clone ID: 32-LIB188-010-Q1-E1-H7
accaggtaaatgatttccccctacctccaaacacattcccacttaactaggcacaagagaaaaaaaaaagaaaggtgtgcccacattcctggtttccacaaatctcaaatcatgggaatgtgcaggacagcccagtgatgttcaggcaatctgaagtcccaaaaggccacaggatagggatgtggcaccctcggcttggagtctgaaactgtgtgtgtgaacagtgcaactttcctgtgtcaaccttcagtgttgaggcagcgtacaaaagagtggctggagagtttgtaatactgaccacactggctccaagtgaaggacctctgctccagcagagaaccctgtcgttccctgtatgtgttgtgagtgaaagacctgcttcacaggggagtttgaaatttctccacgcctacga

SEQ ID NO: 862 - DNA, 433 bp, Bos taurus
  Clone ID: 32-LIB188-014-Q1-E1-H7
catgagcccgaccgcgacggccgcgggatacccacctcatcattctggctgaaaacctgctgtgaggaagaaggtttagaccaagcactttatttcaaccaggtctcaagtttaagtccacaagcatccctggatttctagagataactacctggcctgctgctgccagccaatgacaagctgggtgcctgtccagatgtttgattggtcttactggtcacatgtatagaagaatgctataccttttcttcttgaacagaaagggaaaggttaatttacactgctgccactcaattcaaatgttttctgagtaatgttctcatggccctcagtcttgaaacttgaaatataaattggtggctgttggaagccagaacatttaactccatcagatgaaaaacaggtctcagcaccagcctaaaccttgttgcca

SEQ ID NO: 863 - DNA, 359 bp, Bos taurus
  Clone ID: 32-LIB188-016-Q1-E1-H7
accttttgctgctttgggataagactgttttcctgtttagattttaagcattgccagagagaagaagctgttctgttcttttgattgtggcacagcctgatagctctagctgcagcccctctgatgaggaatgagtgcctaccaggacatctgggcaactagctatgtttcctcggactccagcttagttggcactccattgcctgtgaggacctttctggcatgtgattatttacttcagaattagagtttcaggcacctacgttgactgttttatatcatgtgcagaataatacatcttttaatgtcagatacaatacactgcacatattgcttttgcactgttttaaaatttttgt

SEQ ID NO: 864 - DNA, 231 bp, Bos taurus
  Clone ID: 32-LIB188-017-Q1-E1-H7
gccatggcggcgggatacttcacaatgatgtgaggtcattaagtgtcgcacgcatacagatctcgcgcacacagtgaacatcatcagaaattcgaatctacaccaatgggatatcacggaatgaagggtccattgcgtacggcagctgtagtcgagttaatgatcaagacactcgtgatatttcaggctgttgtcttgtctacggtggtattgcatgacttctcatctatc

SEQ ID NO: 865 - DNA, 430 bp, Bos taurus
  Clone ID: 32-LIB188-018-Q1-E1-H7
gccatggcggcgggatacgtgtgcaggctgaaccgaagtgatagcgacagctccaccctgtccaagaagccaccttttgttcgaaattccttggagcgacgcagcgtccggatgaagcggccttcatccgtcaaatccctgcgcgctgaacgcctgccgcgcacctcgctggacctcgagttggacctgcaggccaccaggacctggcacagccagctgactcaggagatctcggtgctgaaggagctcaaggagcagctggaacaagccaagagccacggggagaaggagctgccacagtgggtgcgggaggacgagcgcttccgcctgctgctgaggatgctggagaagcggatggaccgagcagagcacaagggagagcttcagacagacaagatgatgaggtcagccgccaaggacgtgcacaggc

SEQ ID NO: 866 - DNA, 417 bp, Bos taurus
  Clone ID: 32-LIB188-021-Q1-E1-H7
acttgtaaacaagtatgtaaaaatggtattccctatttataggaaatgtttacagaaaaaatatagctagagggatcaaactagagttgatgtgaaggccatacatttttatttttccattctcctctttaaaccttccctaacactgcaaccacataaagttgaattttagaactggtagaatttctaagtgtggctcctaactggcagcatcacataggaacataacagaaatgcagtctttcgtatgctgctccacacctgcaacattctaggggtgaggccagccacgttttaacaagccttccagtaacactggcgcagcacttggccttccttcagcctgtgcataatctttaccagtctcttctgtaaaaatttcacttgagtagcctcctggaataatgggccctgaca

SEQ ID NO: 867 - DNA, 438 bp, Bos taurus
  Clone ID: 32-LIB188-026-Q1-E1-H7
gcaactctagccgcatggcgcgggatacaataagatagcatttactaccaagataataccaggattctagaagaaaataaaaaggtgatagttcaatcagagatatgaacttccttccagagaagcaatgcttaaactgaatttaagagcaatacgcaaatgcaccagggatatatattatgggccatcagaacgttgattgttgtgaaagccacttaggaagtggagttgagccgtgaacaacacaagtttgaattgtgtagctccgcttacatgttggatttttttcggtagtaaatgctttagtaataaacaatcccaagttgttgaatctgcggatatagaaccatggttatggagggcagactgtaggatatgcatagattttggactgcatagagagtcagcaccccttaccccctcactgttcaagggtca

SEQ ID NO: 868 - DNA, 450 bp, Bos taurus
  unsure (48): Clone ID: 33-LIB188-001-Q1-E1-A2
tggccgcgggatactcctccagattacagcacttgctccttttagcanaaagaacattgattcttaaagcaattgattctctacaattgtgaatataaatatgctgataaaattgccaagatatttgatgtagaggcaggaattaagtttgtcagagttagctttttactatttttattcttaacaagtatgttaagaggcattcctacttttttccttttgtggtttaaaaaaagacagtaggtagagtataccactgttgtatatatgctaaaagtgggtgaattctagtggaataatttctaacatccgcagacttgttttgcaatggcaaatatttttagaacaccagttttaaatattgctgttgtatcaaacccaactctgattgttttccaacaaggcatctgaagttgttaaagagcaaaaaggttatccatatagtaagcg

SEQ ID NO: 869 - DNA, 376 bp, Bos taurus
  Clone ID: 33-LIB188-007-Q1-E1-A10
acgctggtaacaacgccccccaagttgggctcctgtcggtgtcttaggtgagggttccccatcgccccccgccccccacaggggctcaaaagtatcaagggaatggcggccacctgattccccatggagacaggcaaacggattttgactggcggccccagcggtcactggagtcctgttccctgtgtcgtccgactatcaaggatgtgcaatgtcacatgtccatccatagcccaggcctgggggtggtgagtatcaaaaggaggaaagaatggtttgtgaagacaggcacgagatatatatatactactatgagtgtgcagttctaaaccacagttgcaggaggacacaggtatgattgtgggggagtatcact

SEQ ID NO: 870 - DNA, 284 bp, Bos taurus
  unsure (206): Clone ID: 33-LIB188-007-Q1-E1-A2
acagcccacagcggactcctagcctcctctctggggcctggtttcaagcccccagaggacagtgactcttgtccacgtgtggccactccctgcctgggcaggggctccagacaagggctgtctggaccctcaaagacagagaagatgcccatgactggagaagtccccttgatgagtaggggaagctgcaggaaatgccctctgangagagcagggctgtagggctgctgggcacagaccccgaaaacgtgggacagaggggcacaagaaacccccctcacccg

SEQ ID NO: 871 - DNA, 254 bp, Bos taurus
  Clone ID: 33-LIB188-014-Q1-E1-A2
ggatacccgcacggcaacacccgagcgccacaaatccccattgctttgccctcccatctcttcacttgtgtattcactgatgagaaaagcaaaggaaacaagatgtgattctgtcggtctgtgctctaattgcagtcgcactgtgtgaacactgtctgcccaccgggggaagtcctatctgctgctgccacaatataatcatgctgcttgtgaagtgcacggagttgttttgacactggcacccactgtaatgt

SEQ ID NO: 872 - DNA, 324 bp, Bos taurus
  Clone ID: 33-LIB188-019-Q1-E1-A2
acatatatatgatttcttgtagaaattgattttcttctgtttaattttatggtttttattatcatactcttgatttttctaaatttctgtgtgtgaaaatataacattgattgaattgcagttacctttggctagtaatatttcattattttaataaccatgatgccacgtatggatttactttgggtttcaaatcaaaatgtcactgccagaaagagccgttccagacgagcctagtgcctcctgtgccccggcgtgtccctggaatcagctgacttgagagtggtgcaaggaattctcaccagaagtgtacagaccacttgt

SEQ ID NO: 873 - DNA, 197 bp, Bos taurus
  Clone ID: 33-LIB188-022-Q1-E1-A2
ccgaggcgcatggtccgtggccatggacgccggatacacactgtcaagctggcatctgggagccacaatgctggctgcattacccgatacctggcctcccaacaacagctcccaacatccctggatgggaaaacaaccaagactccagcaaaacaatatcccagaaggatctgcagtgtcacaggcaccaaagctgt

SEQ ID NO: 874 - DNA, 397 bp, Bos taurus
  unsure (384): Clone ID: 33-LIB188-026-Q1-E1-A2
atggccgcggcatactgtaatggacagagcagcatttagctgaggactccagactggcggtggaagccagagacagaaaggtcatagttcatggtcaacgcagctctgggctttgactttggcaagatgggtggggcctcatggaaaggagaagtaggacactcgtatctagctcgccagagaggcacacctggttcccaggggtcaaagtgcttgctcacacgtgcatacatgcctgcctgtatgtgagcatatgagggtggtgtgcctgagggtatccacagaagcacttgtgtgcagtctaagaattccatccgtgtgcatcaagagtccatccgtatatatacaacctgcgaacatgcaagccagtgtgagaactcctgngtgcatgcaagcc

SEQ ID NO: 875 - DNA, 414 bp, Bos taurus
  Clone ID: 33-LIB188-028-Q1-E1-A10
gccataggcccgggatactgataatgtagcatttgatatggaaaggctcaccagaacccaagcggttaaccgaagatcggccctaggtgagctcgccagcgacaactcccttggccttgagccacttcgcacttcggggatctcgcctcttcctcaggatggcgagctcactcctcgaacaggagagatcaacatcgcagtaacaaaagaatggtttattattgccagttttggcctcctcagtgccctcacactctgctacatgatcatcagagccacagctagcttgaatgctaatgaggtagaatggttttgaagaaagaaaaacactgctttctgactgattgccttgaaggaaaaaagaacctatttttgtgcatcatttaccaatcatgccacacaagcatttatttt

SEQ ID NO: 876 - DNA, 411 bp, Bos taurus
  Clone ID: 34-LIB188-002-Q1-E1-A6
acctgcaagcactggtgggctggatctgtaaatgcgagcagaggcagtcccctggcaaaatggaggggtgtggcagtggacccatgaagggaaaatctggccctagacctgccccatgttaaccactagagaaattttactttgtatccttttgtgatgcctgtgaattttaacagatcaaagcattagaccaaaatactcaggagatttttctttaaatatccctgatattttagttatgtcaataggatgggaaagctttcgtttttgtttgaaaactaaacaaaaccatcttgcaaactgtttatcactgaaagtcttcccttataattgcacgtgcatcttgaatttcagaaaacattaattcacaataggggagcaggacatgctctttgttgaaacactttttgt

SEQ ID NO: 877 - DNA, 423 bp, Bos taurus
  Clone ID: 34-LIB188-003-Q1-E1-A6
ccatgcgcggcgggataccatacagatgtacaacatgccaagacctccgtagccttgtgagttcctctcctgaatctttggggtgagaggggtgctgcttccagttcaaaggcctgacttctgatcaggttctcctcaggacacttcagtctccctgttcttcccccataaagggaacttgtcagaagcaaggacacccccctcacccccaagtcacagcccgaagaggagagctgaagctccctccttctcacctcaccccttctgccttatcttccctgctctgcattttagaaaattgcagctaattgttttaagggctggagggagggagtccggggacacaccttttatacaacacaaagctttgctccccccccacccttggttcccttctctcttccaaatggttggagacacatc

SEQ ID NO: 878 - DNA, 440 bp, Bos taurus
  Clone ID: 34-LIB188-010-Q1-E1-A6
actagtaaattttgacagggcttcgattttgaccatttcaccccaaaggttggcagcactgatctgtagcagctgaaataccaaggagacagcctttccttggttcccatcccactgcaggcccttgctgaatagtcattaacatgtatgaataaacttggtcaattattatttaaaacatggcagacactggccataaattaattaaaccaaaggtaacaaaggctttagctgaaaatttctgaaaaggtgcatactatgttattaaaaaagatgatgttaaatgacagaaattgaaagaactcaaaaagaccaaaaagcaccgagataggttaaggggaaaattaagtttcctcagttgttaatcaggtgcatgcaaatcttttgacttgaatatagaaatgtccataagaagtatcaggaggacatttctgaaaaca

SEQ ID NO: 879 - DNA, 391 bp, Bos taurus
  Clone ID: 34-LIB188-017-Q1-E1-A6
ccatggcggcgggatacaagtcttcagtctcctatcatctatacttctgttcaagtgggtctgcgtatattctgctgactagacacccctgagacaggcaccttctgcagcagaaaggaagccttctcattgttctgcttcattcagattggactgtcttatcactggctctgtggtttttatcaatggttttcctacctagctgtcacttcttttttaatgcttttgggggttaatttttttatattttcttcaccccaccaagttagatgtctccattttctgacctctgggctttgttgctcagcagggctctgaaggagagtttctctcattggacaggcccaatcttctcccatcattgtcctgctgtgactccaaagaaaggagc

SEQ ID NO: 880 - DNA, 392 bp, Bos taurus
  Clone ID: 34-LIB188-021-Q1-E1-A6
acattttcgccacggcccgtctgctcagcaaggtcccaggttcacagtgctgtgaggtgggccactcgctccgaccccacagcatgacgccgctctatcctgttcatctccggagggtggtcaccaatgtcagcagctacattatcaagaatgtcggtaatccgctttccatctcccagacatcctcagtgacctggcttggaactggtacatggacgtcacttggatgccccatcctatccgtgtgggtgtgttttgactggtaagtcgtatgctgttgcccggtgtgacataatgttcggaaagtaccacttggactggcattattcacccactgcagattccgtacgtatacatcttctgactgtttgcaaatttacactcgaatgggt

SEQ ID NO: 881 - DNA, 282 bp, Bos taurus
  Clone ID: 34-LIB188-022-Q1-E1-A10
actcgtagtatttctgggccatcctggtgatgtagttgcccatggaggcccaaagaggcacaatggccatgcccagggccacagctgagggcacaagcgtgtagtagcgctcccagtacttggtggagacgaagagggcgtaaatgcccacagccaggaacatcatccacttggtgccaaagaacctgatgagcacgggcgtgtagagcagggcggcgatgggcgtcacgttgatacccatcagcatcttgctgtcgatgtcgggcagccccatgttgccgt

SEQ ID NO: 882 - DNA, 293 bp, Bos taurus
  Clone ID: 34-LIB188-025-Q1-E1-A6
accagtggatggagaagaaagaatggcaggatttcctcctcttgttgctgaagacatcacgttagatgaaggacttggggaatctgaagcagtggctgacatcaagttctcctctgcaggttgggtagcagtgacaccgcagtttaaggacacactgaccctccgaggctatacacctcaagggacagtcctgacagtccggcgccctctcttgccacatatagttaacatcaaaggaaagcgcatcaagggaagtgtggcgtataaaaccaaaaggcctcctgctcttatgt

SEQ ID NO: 883 - DNA, 308 bp, Bos taurus
  Clone ID: 35-LIB188-001-Q1-E1-A4
acaacataagtgtcctgaaacttaaaataatttcaacttaatttcaaaacaaacaccccaagaatcaactttccctttaaataaaaaaaataatcaatttaatactcttcttgaaagaactccgagaatgtaaaataagttccaattccatatatatatatcatatatatatacatttataacttaggttgctctgcttctctatatacttttactcatgcaacgcagtgggggcggacgtgagggctacagcggcctctcggagaatgcggtgtagctcctcaccctggcgaacagcagtggcgtgt

SEQ ID NO: 884 - DNA, 368 bp, Bos taurus
  Clone ID: 35-LIB188-005-Q1-E1-A4
cagttcagaaagaagatcgagttattagaagtcaccatgatgctcggaagcactagaacctcttctctagcagagaagggctactcagtctggcatgcagcatctggactgatggaccaagccacgcactgtgaaccctcctcagggagccaggaatggatgccacttcagctacagacaagcgagccagtgatttctgaggaagacacccaggaactggggcagatcctgaggaagctcaaaagtcttgcgttagacactgagacagagctggagagacaggatgaggccttggatggcatcactgaagctgtggaccgggcgaccttaaccatcgacaagcataaccgacgaatgaagaaactgac

SEQ ID NO: 885 - DNA, 403 bp, Bos taurus
  unsure (299),(322): unsure at all n locations; Clone ID: 35-LIB188-011-Q1-E1-A12
atgcgccggacgccatgaacgcgggatactaggaggacacctgaggctccccagtcacgtcgaagggactagcagtgtttcacatgagttcaggacagtgcttcccatgccaagtccatgggaagtaacaattttgggagtgacagttgaaggctggtgctttgctagcacacttggggctgacagatgcttgctgtgtccagggctactcttccaagtctgaaacccccaagcctccacactgtgcctccagcctcctgcctccaggctggaatcttgtgcacattcatgcctgctanggacagacagaaatcctccacanaaccagacatgtcagcatcagaaaaggctctgatggagacaagatgaacttcagaatgggcttagcctggacctcaaacta

SEQ ID NO: 886 - DNA, 312 bp, Bos taurus
  Clone ID: 35-LIB188-011-Q1-E1-A4
acttccagacactgagtgggtaagatgtgacatgtgggtgtgaaaagggccgcccagccacagtctgtccgtgtcatcctccgatcctgcgtggcagaaggccttcgcataacaccggacactctgctggttgatatcctgtttcccttcgacccgcaggaaccagcggtcccccagcctaaacttgtgcccagagatccccgagcgaagccacatgcaacgttgcaacttcgtctctagcatcatagtggtggctagaacctgcgctctccatagctcatcccgctcgttggctacacgccactgagtgtc

SEQ ID NO: 887 - DNA, 81 bp, Bos taurus
  Clone ID: 35-LIB188-012-Q1-E1-A4
actaactgaatcgacaatatcacgactaactagctcctccttggttaaagatttcatgttccagatttcggaaagggatat

SEQ ID NO: 888 - DNA, 415 bp, Bos taurus
  Clone ID: 35-LIB188-017-Q1-E1-A12
cggatagacacatataaatgtaaaaaatatacaagtgaaaaacgaggccaaaaacctgggtgtggggaggggccacttggtcacaatcacaaataaacatttctgagttcttcctttggtctgactacagccccctctccccaggagagggggtgcagagctgggacctggagatcagaccccagtcccagccctgtcccccaaaataggcagggttggggggcaggcacatctggagcagctggcgctatctagctcgctctggctttgggatggtggggagaacgtggagatgagggagccccttccttttccgagacccctggctgagtgggctgggagcgctgggggtgtgtggggttggcaaagtagcaatggcagtatttggggagtgaatgaaataggtcaagtgagt

SEQ ID NO: 889 - DNA, 237 bp, Bos taurus
  Clone ID: 35-LIB188-017-Q1-E1-A4
gaaaaaaacaaggctttaagggcccttgccctccaaaacaacttttgtcggtatttgtatatggtgcatgtatttgtgtagatttaaattttctcctaagattttcactgacagtgtcagtaacttcaggggctttcaaagcattaaaggttgaagcggtgaatttttcacaaatgctcatgttagagagaagacccaaccccttccttaaggagcatctatctgcttcaccatctg

SEQ ID NO: 890 - DNA, 414 bp, Bos taurus
  Clone ID: 35-LIB188-020-Q1-E1-A4
gccccgggctacagcatcacctaagctgccttcgccatcatcgctgctttgctcatgctcaacctcctcatcgctatgatgggtgacactcactggcgtgtagcccacgagcgggatgagctctggagagcgcaggttgtagccaccactgtgatgctagagaagaagctgccacgttgcctgtggcctcgctcggggatctgtgggcacaagtttgggctgggggaccgctggttcctgcgggtggaagagaaacaggatatcaaccagcagcgtgtccggcgctatgcccaggccttctgccacccaggctcggaggacgacacggaaagactgtggctgggcggcccctttggcacccacctgtcgcttcttaccccctcagtgtctcgaagtacctgcgcgcgctggatg

SEQ ID NO: 891 - DNA, 396 bp, Bos taurus
  Clone ID: 35-LIB188-023-Q1-E1-A4
catggcagggcgatacgatccggggggatcgtgagcacagacgtagttggttaggtgttgtcctttgctttggagctgcttttcatgtgggattgtggtttcccaaccagcgatggcacccataccccctgcattgaaagtgtggagtcttaacccctggaccaccagcgaagtccctggagttgcattttaatctgtttatttactttttctgttaagtgcatctcttacaactaatatgatattccctttaggtatttacaatagagaactcagcagtttctcatagactgatgaaaaaagtaagtgataattgtcattattgaaatcatgtggggacctgtggggcttgccttcctgagtctgggatcgattgctttgaatcagtgtcagtgc

SEQ ID NO: 892 - DNA, 425 bp, Bos taurus
  Clone ID: 36-LIB188-006-Q1-E1-A12
gccatgggcgcgggatacttttggaaaaaagaaaaactcgagtagatcacaggcactgagttcccaactctacctccagctgcctgctccgtgagcagctgtccctttgtctttaggcctacctcgtgacaccgcaagccgccctcagcttgtgtgcagatgcgacagccacacgccggcatttcatcctgctgcccatctcacggctcaaagtaaaaacttgggttgggcaaagaagccttgaggcatctctagtagaaagttgaataaacccacaatctgttcccattttttttgagaaatcaactttatagaatgaaatagttgttgtgattactgtttcatctgaagccaaaacagatttttaagtaagtatactgaataaacatacgaaatagttgttgtgattactgtttcatctgaag

SEQ ID NO: 893 - DNA, 282 bp, Bos taurus
  Clone ID: 36-LIB188-012-Q1-E1-A12
actcgtagtatttctgggccatcctggtgatgtagttgcccatggaggcccaaagaggcacaatggccatgcccagggccacagctgagggcacaagcgtgtagtagcgctcccagtagttggtggagacgaagagggcgtagatgcccacagccaggaacatcatccacttggtgccaaagaacctgatgagcacgggcgtgtagagcagggcggcgatgggcgtcacgttgatacccatcagcatcttgctgtcgatgtcgggcagccccatgttgccgt

SEQ ID NO: 894 - DNA, 369 bp, Bos taurus
  Clone ID: 36-LIB188-014-Q1-E1-A8
acatagaagccagggtgacaatcggtgaaaccctcacctatgactgtgccatgctgctgctgggaagtttgctcttacagtagccagcctctcttgggaaaggccccatcagccttcagctccttcctctctccttaatcaccaccagggcttattcctgtttttctttttttcacacatgtgggctttgggctctgccatgctcacccaggattgtaatctggagtgtgtggaggagtccggggccctctcggaaacattgttattgcactttagctctgtagtaccattctgtaggactacactgtcaacatatttgaggcactgagattcaaatttctgggcagctgtcacagtcctccccacatc

SEQ ID NO: 895 - DNA, 203 bp, Bos taurus
  Clone ID: 36-LIB188-017-Q1-E1-A8
ggatacaggtctaaggtctcttatgatctatgcttctgttcaggtgagtctgcgtccactctgctggacatattcccctagatagacgaacattctgcagtagatgcgaaaccttctcaagtgttctgcctcattcacactgtggagtctaagtattggatctgttgtgtctatcagttgatttccgatgtagatatctgttc

SEQ ID NO: 896 - DNA, 420 bp, Bos taurus
  Clone ID: 36-LIB188-020-Q1-E1-A12
gccatgggcgcgggatactttaaccatggcaggctggtgatgaacttgaccccagtgtgttttatagaagctctgcgaccttgtcatgtgacatgtggaagcagtctgaactgttgcagtccatcagcttagctcatttcaggtgagccagcagccataccttggtccccctgagaaggtcagtcagagactttgggtcaaagttcctacccttctgaacattctttttctcccaaggacattcacaaatagctacttgaatgtatgatcatgttcacccagtccaggcagaaatggggacgccgttggcagggagtattctgactccctttccgtggctgcaagtggtctccagaaataaagggcatggcctggacagcgttcaatcaactcctgggggcaaaggacaaactgccccaa

SEQ ID NO: 897 - DNA, 169 bp, Bos taurus
  Clone ID: 36-LIB188-027-Q1-E1-A12
accaggttttattatctttttatcaaaaaaatcagtaacagacaacaatgtgaggtgctcactcccaacatggccagaggaaaagggacatggggggaggaagaggacccagccagctgggaccctggggtcacagaaggggagggaagcaagggtaactccctccagt

SEQ ID NO: 898 - DNA, 416 bp, Bos taurus
  Clone ID: 37-LIB188-003-Q1-E1-B10
gataccttttgcagctttaggataagactgttttcctgtttagattttaagcattgccagagagaagaagctgttctgttcttttgattgtggcacagcctgatagctctagctgcagccctctgatgaggaatgagtgccttacaggacatctggggaactagctatgtttcctcggactcaagcttagttggcactccattgcctgtgaggacctttctggcatgtgattatttattcagaattagagtttcaggcacctacgttgactgttttatatcatgtgcagaataatacatcttttaatgtcagatacaatacactgcacatattgcttttgcactgttttaaaatttttgttcgagcggccgcccgggcaagtacagccatccaagatttcaaggaagaagaaaata

SEQ ID NO: 899 - DNA, 422 bp, Bos taurus
  Clone ID: 37-LIB188-005-Q1-E1-B10
tcccgaacgctatggccgcgggacacttcataaatttatttttaattgccttgtttgtcttcagtttccttaattttcatggtttacatggatgtgtgtgtacgggctatatttgtgtatatacacgtgggttggggtttttgcatgtgtgggttccatggacgtatgatccccacaagctgtgggagtgattggccaggccttgtttttttaatgtgtgtttttgttttttcgaagaagaggatgctatttagaaaagaaaccgcattgcaaacctcttaccagctcatatgagagagcatattcctgcccttgagcacgctggtaagttgttatcataaatgttttaaaagagttttgagcatttcatgctttaaaagaccttcacacggaatatgacacacaaagttcttttggttttc

SEQ ID NO: 900 - DNA, 369 bp, Bos taurus
  Clone ID: 37-LIB188-007-Q1-E1-B10
gggatacatgttcataagtatgtacaatggcattccctatttaaaggacatgtttacagtcactctccacctacagggatcaaactacaattgcagtaaaagtcatagatttttaattttccattcccctcttataaaccttcactaacactgcaaccacatgtagttgcaattttaaaactggtacaatttctaagtctggctcctaactggcaccatcacatatgaacataacagaaatgcagtcttttcgtaagctgctctacacctgcagcattctacgggttaggccagccacgtattaacatgccttcaagtagcactggcgcaccacttggccttccatcagattgtgcacaatctttatca

SEQ ID NO: 901 - DNA, 111 bp, Bos taurus
  Clone ID: 37-LIB188-007-Q1-E1-B2
gggatactcctgcatgctgatccacatctgctggaaagtggacagcaaggcaatattggaccggcaatccaaaacgggttacaacaatgccggcggctgcaaggtcaacaa

SEQ ID NO: 902 - DNA, 426 bp, Bos taurus
  Clone ID: 37-LIB188-009-Q1-E1-B10
ctccgtacgaatggcggcgggatacaagttccactcggcccgtctgcccagcaaggccccaggttcaaagtgctgggaggtgggcccttcgttccgaccccagcgcacacgcagctccaagctgctgatgtccggagggtggtccccaaggccaggagccacagtattaggaaagtctggaagcccctttccttcccccacccatcctcagagacctggcttggagctgggacagggaggtcacagggaggccccaaaccagccgtttgggtgtgttttgactggtaggtcgtatgctgtcccccgggttgacttgatgttctgaaaccagcctcccactggcagattcacccactgctgacccgacgtatacaccttctgaccggtagcacagacacactcagaagggtcacacatgcacacatg

SEQ ID NO: 903 - DNA, 324 bp, Bos taurus
  Clone ID: 37-LIB188-010-Q1-E1-B2
acaagtggtctgtgcacttctggtgagaattccttgcaccactctcaagtcagctgattccagggacacgccggggcacaggaggcactaggctcgtctggaacggctctttctggcagtgacattttgatttgaaacccaaagtaaatccatacgtggcatcatggttattaaaataatgaaatattactagccaaaggtaactgcaattcaatcaatgttatattttcacacacagaaatttagaaaaatcaagagtatgataataaaaaccataaaattaaacagaagaaaatcaatttctacaagaaatcatatatatgt

SEQ ID NO: 904 - DNA, 265 bp, Bos taurus
  Clone ID: 37-LIB188-012-Q1-E1-B2
acaggaggacgcacttcaggtcctagctggtctgatccatacctaggatcaggtacaccttcgcatgtgcgatgtcagtgcgccaaaaggctgcgatcaacaactttcgggaccgatcagccgtagtgctggcaatcttgatgacattcacgaccattgtcaaaggggacttagtgacgcgcaacatatgcggcatgacttcccggataagcacaagcttcatgccgttctccagtcagggactagtacaggccattttcaaccg

SEQ ID NO: 905 - DNA, 305 bp, Bos taurus
  unsure (4),(19)...(20),(28)...(29),(227): unsure at all n locations; Clone ID: 37-LIB188-014-Q1-E1-B2
actnttgattcctaaatannggagggcnntgggccagaaaaaggtggttagtttcaaggtgcaacgaacttttttttttttaacccaacgcaaggcaatgggaaacttaattccccggacaaggattaaggccgcctcccttaacaggggaattgaggattcttaaccactggaccaccggggaagtccactactagacttctaatgtttatttatcgctaaaacanaagagtgatatattccaggacttagaatagtgcctaaagtgctgtagcaaaagacagaagctggcaagagggcacagc

SEQ ID NO: 906 - DNA, 337 bp, Bos taurus
  Clone ID: 37-LIB188-016-Q1-E1-B2
ccatagccgccggatacaagctttattttttattttgtttttttttttggaaaaagaaaaaagccctttaattggagattttgcaatttaaatgaatcttcatctaacaagacacgttaatggttatagacattgaaaagtgctttcaaaccaactgcacccagtcccccacgcgtttcctaagtgcagagcacgggtgctggcttccccggcaggcaagctgctctccctcccctccccttctttcctctttgccccttgcccttctcgtcctgtctgccacagcctggttcagggtaacatactatcagctctagtgtggacctacgggacagca

SEQ ID NO: 907 - DNA, 387 bp, Bos taurus
  Clone ID: 37-LIB188-017-Q1-E1-B2
acacatttatttccacttgtcattttcctttatagcagattacagaaacttctggttttgtgtttaccctgcaaataattagcattgatatccgttttatcacccagtttatggacgggggtgtgttaacgtgagggcaggaagaaccatgtcccttgggtgagggtgaccctgggtcacgccgccaggttagtgacaggaaactggcttcagaacacgcctggcgtgattctacttcctggattcctgcatgcagacactgggctcccatacaacccaggaaccacgttctggcactggctctggacacaatgcctccctattctgcatgcttatcagctgctctggtacaactgacaaagctttgcttcgtaaatgcagtcacag

SEQ ID NO: 908 - DNA, 426 bp, Bos taurus
  Clone ID: 37-LIB188-019-Q1-E1-B10
acaaaactcccgcgtctttgcgagcagctgcagatctcactgtcatccgtgttcctcgtgagcaaagaaaagctgggtctcaccccacagcaccagggtctcctgagcaccctgtggccatcagggagccgacaggctggggcaggaagctgccctgtaaccacgggccggcgagggagggcaaacctttcctctgtgtaactcagacatgggagaaatggctgccgccaccacaagctatgcattctactcggtgtttccagtgagcttgatgtcttgcttggaaagtggatgtgtctgtctgtcctgaggatgcgtgtctatctgtcctggaaacttaccagcagaatcctcattcctttgctacagatgtacggccggatcatcaaggacgtggtgctgcagtggggagagatgccacctctg

SEQ ID NO: 909 - DNA, 313 bp, Bos taurus
  Clone ID: 37-LIB188-021-Q1-E1-B10
tggcggcgggatacaggaaagagaagcacaatttggaacaacagcagagatatatgcctaccgagaagaacaggattttggaatcgaggttgtgaaagtgaaagcaatcggaagacagagattcagagtccttgagattaggacacagtcagacggaatccagcaggcgaaagtgcatattcttcccgagtgtgtgctgccttcgaccatgtctgcagttcaattagaatccctcaataagtgccggatatttccttcaaaacctgtctcatgggaagaccagtgttcatacaaatggtggcagaaataccat

SEQ ID NO: 910 - DNA, 258 bp, Bos taurus
  Clone ID: 37-LIB188-021-Q1-E1-B2
ggatccatgtctaatttgaaacatagaaccatactctgcaaaactattctgtgtatcactgactcacatcccaaactgattaattccagtctgtatacgtcttcgaatcatcaatctgtagcttgggtcaaatacatgaacaggggatcgcacactgggatatgccatattgcaaacatctattggaacattcgtggtcaagtgtcatagttcagcagtttcttcatcatatattttttatctcacatacagctcatc

SEQ ID NO: 911 - DNA, 398 bp, Bos taurus
  Clone ID: 37-LIB188-022-Q1-E1-B2
tttaaacactaataatgtcctgtgagtaatccgtgtgtgttgggaaaaggaaaaatactgaatgggggttcacattggtataaaattttggaaacccggggcaataatgccatgccgttgtgattttcttccactcttctcaaattccgcatttaaaacatgtttctttatatgagctcacatcccattaagccttgtcagtgttgcaacggctctgatgtggggtgggatcttcactgtgttacattccattttacattcgaagtaggattgagctctgtgttttggggaacagccagggaagcttatttatccccttgtgtgttccttatctaagtaagcaaacgttccactagtcttttttactcatccatgaaattgtagaccaagggttactc

SEQ ID NO: 912 - DNA, 181 bp, Bos taurus
  Clone ID: 37-LIB188-023-Q1-E1-B2
catggtatggcgatacgatccctgaaactgctctaggcacaggcctagctgcagctgcacttgatcaaggcccaacagctgacttaggcggaagtaatgacgttcacgcagatcacggttgccctgtggcccagggtgacctgacacatggcagtggtacggtgcgacatacatgtgggca

SEQ ID NO: 913 - DNA, 428 bp, Bos taurus
  unsure (373): Clone ID: 38-LIB188-002-Q1-E1-B6
acttttgcagcttcagcatatttattgggtttgtttgtttgattaaatcagttctacagtggatttaagggtttttcctctgtagctcaaaggtggaaggcgtttattttattagctaaccaaatatcattgagaggaatttgaactactgttactaccaaagatttttattaataaaggcttctattttggtaacacttctctatatttttacttacaggaatgttactgttggaaattatcattttaaaaaacttgtaaaaacaaacctccatagctgataggaatggtctcaacttgcagccccattatactaacgatgatctgaagtttctcaagcacgcagagaaacgtaagagaaacgttccagcanagggaggggcgaaaacacgaacatgtttgtcttgaacatgtggttggtgagcgcg

SEQ ID NO: 914 - DNA, 396 bp, Bos taurus
  Clone ID: 38-LIB188-006-Q1-E1-B6
acatactaaaattccattatcttcaggttccacatgcaaagtcctgggtggctggagagcaggggatgagagaccctcctttggtcagaaatccagcagagttcaggctgaacagggtttggcactaaatctaggtatcctggttgaatgtatttggatcaggcaggcaaaaagggacctcatctaatcccagcccccacccagcgaaactgctggaagagccccaagttagtgacccggagacccctggggaaaaggggatattcttgctgccagtagctccttcacctcacttgaactcccaccctccctggttctattatcactattctctgtcccctacaccatgactaaaccaagagcccttggtcacaagtcctagtgacccccctcaca

SEQ ID NO: 915 - DNA, 372 bp, Bos taurus
  Clone ID: 38-LIB188-009-Q1-E1-B6
actcccccacaatcatacctgtgtcctcctgcaactgtggtttagaactgcacactcatagtagtatatatatatctcgtgcctgtcttcacaaaccattctttcctccttttgatactcaccacccccaggcctgggctatggatggacatgtgacattgcacatccttgatagtcggacgacacagggaacaaggctccagtgaccgctggggccgccaagtcaaaatccgtttgcctgtctccatggggaatcaagtgggcgccattcccttgaaacttttgagcccctgtggggggccgggggccatggggaaccctcacctaagacaccgacaggagcccaacttgggggggcgctgttgacagcgt

SEQ ID NO: 916 - DNA, 386 bp, Bos taurus
  Clone ID: 38-LIB188-016-Q1-E1-B10
acttcgagacactgagggggtaagaagcgacaggtgggtgccaaaggggccgcccagccacagtctttccgtgtcgtcctccgagcctgggtggcagaaggcctgggcatagcgccggacacgctgctggttgatatcctgtttctcttccacccgcaggaaccggcggtcccccagcccaaacttgtgcccacagatccccgagcgaggccacaggcaacgtggcagcttcttctctagcatcacagtggtggctacaacctgcgctctccagagctcatcccgctcgtgggctacacgccagtgagtgtcacccatcatagcgatgaggaggttgagcatgagcaaagcagcgatgatggcgaaggcagcgtaggtgatgctgt

SEQ ID NO: 917 - DNA, 373 bp, Bos taurus
  Clone ID: 38-LIB188-017-Q1-E1-B6
gccatggcggcgggatacacgccaaagctgttcgccagggtgaggagctacaccgcattctccgagaggccgctgtagccctcacgtccgcccccactgcgttgcatgagtaaaagtatatagagaagcagagcaacctaagttataaatgtatatagatatatgatatatatatatggaattggttggtactttacattgactgacttctttcatgaagagtattgagttgattaattattttatttataggcacgtttgatccttggggggttggtttggaagtaagttgaaaggaatttaagtttcatgaaagttacgttgtttcactaatgaaggcggctgcaggtccagccaacgggagagctcccaa

SEQ ID NO: 918 - DNA, 384 bp, Bos taurus
  Clone ID: 38-LIB188-018-Q1-E1-B10
ctcccgtaggccatggcggcgggatacctccacaaaatacaacatatggacctttacctagacactatgatcatactgtaattaccgggacacaacaagcacctttctggcgatcagacgatatctgctgtcagggtcaggatattcagcggaagcctccctgaggctgccattgtcccactaaaacacggcgcctcagggggctacgtacagatccggcctcgaagcctgtgtacatcgttggtgggagacatgaacatcctgtcggtcaggtgcacccgcttgtggacatcgcggatctatctgattcgcaaacatccttagaagcaagcggactcgctcgacctctggcacacaatgtcacagctcattttcccaatggct

SEQ ID NO: 919 - DNA, 264 bp, Bos taurus
  Clone ID: 38-LIB188-022-Q1-E1-B6
acatgaagggcagatccacgtcgtagttgggggggccgtcgatgatggtgaggaacagctcaaaggtgctgaacagtgccatggggtaactgtagaaatggcccagctcattggggtcctctgtctggaagatgataaagaaggccgaggcaaagcccaggatgaccacggccatcagccagcagaatctcatcagatcgccaaaaatcatcttctggatcatgatggtgaaggggcccagcatctggaatcctcgcgcaaagt

SEQ ID NO: 920 - DNA, 154 bp, Bos taurus
  Clone ID: 38-LIB188-024-Q1-E1-B6
actaagtattaacatttatagttcttcaaatttgcaaactttatacctttaagatatctacaatgatagtttatttacaggtttcacaagaaatcaccacctcaccaatactgctgctcagatgtaaggggcgccctggctcacttcaccctgt

SEQ ID NO: 921 - DNA, 348 bp, Bos taurus
  Clone ID: 38-LIB188-028-Q1-E1-B6
acattctctcactgagtgtgggggcatggaggacccccagggctcttcctgagaccttctgtttggctgaagggctgggtctggtcctgactgtgcttgggaggtccccttcagtgtgctgtcctggtcacggagagccctcttccatatgcccctcaccagcccctggggcttgcaggctgcaagtcgtgaacacccaaggcctcttgtccaggacagaaactggtccccaccttaagttctggacagaatctgttcagcaatgcccctcgaaggtttccaaaagtgaaagtgaaagttgctcagttgtgtccaactgtttgcgaccccatggactatacagtccat

SEQ ID NO: 922 - DNA, 259 bp, Bos taurus
  Clone ID: 39-LIB188-011-Q1-E1-B12
ccatggaggccggatacccgcccgagcggccgcacgaacaagatcaaactactacaatcttactttgctagtaatacatattttttaatttggggatacacagtttcaaagttttctatgcaaaagaatgaatgtaataaggcttaattacatactgcacactgagactggaactgttctgtggacaagacagcacctgttctgtttatgttttataaagtcctactttatggctaactttgttattagtcttcacagt

SEQ ID NO: 923 - DNA, 427 bp, Bos taurus
  unsure (219),(269): unsure at all n locations; Clone ID: 39-LIB188-017-Q1-E1-B12
accccgtctatagctcctctccccaccacattcacagcattcagataaatttgaggatttaataaggaaattataaaaggtaagaaaacccaaatgtgcagccagaaaatccgaaaaaggtccctttcaaaccaaattgggggcctgcccttgacttcccaaaaaggacagaaactggttggttaaccacaaaaattccctggaagcaacctcacaagngaatctcagccacagactggttccctaccccaagcaaaaggtgggaatangacaaaggactgtttatagaatcaatgcacaagcaatgagagctataaggaaagactgagagagagagagagaggtggggaggaccttgacagagtcccaggtttttggccctcagtgcctcaatgtgttgacatgtagttctacagaatgttactgc

SEQ ID NO: 924 - DNA, 380 bp, Bos taurus
  Clone ID: 39-LIB188-018-Q1-E1-B4
agtgatcaagctcaaatcacggtctttttcagcttttaattagttttccagggactggttctagcttgaagtcctatgaaatatgtggcttgagtacaatctgttggaagagagggtgcgagtgaggcttatgaagtcagacgaggtatatgtcgatgacagattctgtccaaactatctgttccattatttctattttcttcctcattcaaaatgattcagtctgaactctgctgtttcgctcctcacctaactgatgaaatgtcagtgcctttgggagctaaattaatttttttccttcctcctgtgtctctgcatctcgtgtccagtaactgttccgccgtcttgagttttaactttaattaatttatgtatggctg

SEQ ID NO: 925 - DNA, 409 bp, Bos taurus
  Clone ID: 39-LIB188-020-Q1-E1-B4
accatctgattcggatgtcactaccaaaacgggagtgcctcaaacagccagcctccaatgcccagagccaggcccagttgggttggagtatagatttaaaactgaaagcattctgagtttgggggaattcaggttgtaggatttctcatgcctgagacctctgcaaggcatctctaggccttctcctattccctccctgaccacaaacacaaactcacactactatcctcaaatcccaggaaatctcagctgttggggcagtttctcctccttagttttggggacagactttgcctagtatcaatacaaatccagccctttagccctgagactggtggtgtaaaactgatggcaaggtagcaaccacagaccagaaccaaacccaggatttggtctgtttacctgtttg

SEQ ID NO: 926 - DNA, 360 bp, Bos taurus
  Clone ID: 39-LIB188-024-Q1-E1-B4
ccatgtccggccggatagcccgtggagatatgtaagccatggtggcttgtcagactctctagggcaaagaatctagctgtaatgagggagacatcggttggtgaaatcacccgcacatggtaaaggttacgcatcctagtgctcatcctaggagtctcctcatagagaaacgagcttattggctttcagtccatggtgtcatatctgatcagccaatagtgcacgactatgtacataacacagttggaaattgcgctatagagtttaatcatgtgtccgttaccatttatatattgtacacgctatccaccttctcttcaaggcacgagtgtgtgtgatctgtttttacaaatcactgtg

SEQ ID NO: 927 - DNA, 402 bp, Bos taurus
  Clone ID: 40-LIB188-010-Q1-E1-B12
acttttggtagcaactaaaccctttcctaaatgcttcctcctcctaagccagcaagtttccttacagcatgatgtggagaggtaatcgttacgagtctcggtgattctagaacttggttaaagctttgtcttagtggttggcacagagctctgttaaaacatgacagctgcgtcgagatcgccaatgacatgatgtgtttgattccagacagcaccttgcaggtctgagattgccaccctgttatcacagggccgtgacattttctgatgtgattcacggagcaacatgtttgcgtggaggggaagagctcgtttgtaaacatgtgcagcttttggaattacaggcctcgaatctgagagttcaggtagagaccctttgtaatgatgcatttcctcaaatac

SEQ ID NO: 928 - DNA, 427 bp, Bos taurus
  unsure (326): Clone ID: 40-LIB188-011-Q1-E1-B8
accactcgaggaggctgttttggttaacgctgcagggctgtgctcccagctcctctctctcctctttaccctgcattctctagtcgtaacaaacagaatcagctggttgagaagaaactcgcgcaactgaaaaaattaagaaatctacttcccttgaaggtggtgacagggtttctactagttctttctcactgtgtatcacgtttccacttacttaggaagtctgtttgattgcagctatgctgtcccgtaggtccacactagagctgatagtatgttaccctgaaccaggctgtggcagacaggacgagaagggcaaggggcanagaggaaaagaaggaagggaaggagtacagcctgcctgccggggaaagcagcaccctgctctggcactagggaacgcgtgggggactgggtgcagttggtt

SEQ ID NO: 929 - DNA, 394 bp, Bos taurus
  Clone ID: 40-LIB188-012-Q1-E1-B12
actaaaaaaaaatgcttgtgtggcatgattggtaaatgatgcacaaaaataggttcttttttccttcaaggcaatcagtcagaaagcagtgtttttctttcttcaaaaccattctacctcattagcattcaagctagctgtggctctgatgatcatgtaccagagtgtgagggcactgaggaggccaaaactggcaataataaaccattcttttgttactgcgatgttgatctctcctgttcgaggagtgagctcgccatcctgaggaacaggcgagatccccgaagtgcgaagtggctcaaggccaagggagttgtcgctggcgagctcacctatggccgatcttcggttaaccgcttgggttctggtgagcctttccaaatcaaatgctaca

SEQ ID NO: 930 - DNA, 391 bp, Bos taurus
  Clone ID: 40-LIB188-015-Q1-E1-B8
acttaaaaccacttgtatttcttttgcctagtatgtggtttttaaactagctaaaaacccctagtatttgttctgtcttcacctgccttcattaaaagccctgactcaattttggtgttgagaaggaacaaaacccaggcccatcccagtgcttctgcccctcagcaccagggcccagcatggacctggtaaggagggcacagtggatatccacccaagacagggaaatgaggattatgaggaactatgaatgtagtggataaactagacccctctgatgcctcagctcccagcatgttctcaaaagcagttcaatgtctggggaggaacagggctgtcatagcccaaaaccaccaacctctaccctatttattcctggttcctccagaag

SEQ ID NO: 931 - DNA, 345 bp, Bos taurus
  Clone ID: 40-LIB188-020-Q1-E1-B12
accttactggtcgctgtgggtctgggcgggcctggagccaaaaggcgactactgttcctccccggagccattccaggtggggagggaggggggtttcagacttgtgttcctctccctcgtcctcctgtctccttaggctcagtagaagcggtggggaccctctaccagcttcctgagccctgcctgcagttggccacccagcactgattggggacaagggctgaactgctggccaccagccacacctaggaaggagctggggcctagaagctaggcagccttcggcctcaggggccgcttcgtgccctcccagctgggaggggtcgctgtttcgccttgtctgtc

SEQ ID NO: 932 - DNA, 418 bp, Bos taurus
  Clone ID: 40-LIB188-022-Q1-E1-B8
acttaaaacaacttgtatttcttttgcctagtatgtggtttttaaactagctaaaaacccctagtatttgttctgtcttcacctgccttcattaaaagccctgactcaattttggtgttgagaaggaacaaaacccaggcccatcccagtgcttctgcccctcagcaccagggcccagcatggacctggtaaggagggcacagtggatatccacccaatacagggaaatgaggattatgaggaactatgaatgtagtggataaactagacccctctgatgcctcagctcccagcatgttctcaaaagcagttcaatgtctggggaggaacagggctgtcatagctcaaaaccaccaacctctaccctatttattcctggttcctccagaatcagtgctggggagaaacatgaatattc

SEQ ID NO: 933 - DNA, 423 bp, Bos taurus
  Clone ID: 40-LIB188-026-Q1-E1-B8
cgccatggcgcgggatacatctacgcctcggctcgtctgcccagcaaggccccaggttcaaagtggtgggaggtgggcccatctttccaacaccagcgcacacgcagctccaagctgctgatgtcgggagggtggtctccagggccaggagccacatctattatgaaagtctggaaccccctttccttcccacacccatcgtcagagacctggcttggagctgggacagggacgtcacagggaggcctcaatgtagccgtttgggtgtgttttgactggtacgtcgtatgctgtctcccgggttgacttgaggtactgatcccagtctcacactgtcaggattcacccatgctgaaccccgacgtatacaccttcggatccgtaagcacagacatcaccagatgggtcacacatgcacacatg

SEQ ID NO: 934 - DNA, 263 bp, Bos taurus
  unsure (131),(147): unsure at all n locations; Clone ID: 41-LIB188-003-Q1-E1-C2
ggcggccggacacaaacgctaaagaacaaggggagcagacacgcgtacggtaagaggggctcggtgggagaacgtcacggggcagatggtgcactggggccaaaaagaacaacacacaggccaatatctanagggcaagccgggtangaaagggtttaaaaacgagatcaagccagccagatcgccaggatgtgcggggtgtcgtccactttgtccacttccgatctcccccaaagtcacagtgcatgcaataacatatatgt

SEQ ID NO: 935 - DNA, 405 bp, Bos taurus
  Clone ID: 41-LIB188-005-Q1-E1-C10
gatactggcagactccacttttccactcagaatggatggaactgggccactggtggcacaaagacagggaagggcatttcaatatataaagtattttaaagatgcttaaaatggacacccgaatatgtgggtgtcgatttacccctgggtagcagaggatctcctcacccaggtgagaagagatgggttccatctccaggtgaaggaaaggcactggctcacagtcttcagggactgaaacagacaccaggagcaggacgcctcaccacacagctcactcctcagctctagtgttccttcctcactctcctggtttcaagtaaaaatgacccttggcctgggcttggtttttttttttaaagattaagatgggagaggaaaagggcacactgcacgcaagaagag

SEQ ID NO: 936 - DNA, 428 bp, Bos taurus
  Clone ID: 41-LIB188-011-Q1-E1-C2
actactctatcaatggctataatcaccatcgtgagaagtagaatatcagatgtaaggtcattatgtaaaaagaaaaaaaaggaaatagtcaagtgcaggtttagcacaggggcacgggagaacgcaggggaaagtctgagagacttgcatactgatggggaggtgaggcagggacggggccaggaagacaaggctgctcagggcccggcagtgggcagctccttgcagcagggaactcaggccagatgtagaccttccagagtcaggcctgtcagagggaccccctggaagtgaagggggaagggtggggccagaatggggctctgccacaaggaactcccagacaggctgctgtcctcctcagacaggaaggcgcaggcccaagagacagggagagccttcccccaggtctcctgccctgctggggc

SEQ ID NO: 937 - DNA, 428 bp, Bos taurus
  unsure (363): Clone ID: 42-LIB188-002-Q1-E1-C6
accatgcagcaggtatcagcactgttaaggtgctgcaagaatgcccagccctctggtgtctgatcacatatacccagcaacattacagtcttgagggatgcccgggcctcggcccatggacaattaaatacatttaagcagggtcttctctttcccccttcctgcttctagaacataaaaggactacaattaaggaatactgggaattttagagctgggaaaatgaagtctgaaagatgaatcaaggccaacaatgactgagaacctggctgctgcttaccctggcaaatcttaaaagtcgttacttcaacctcgtgggaattaggtgtaaaaggtttgctgcaacatgttcttggtaaacanactaagtagagctcttatttacaaatcttgtaacaaacacttctggagaaaaaaagagaattcgc

SEQ ID NO: 938 - DNA, 397 bp, Bos taurus
  Clone ID: 42-LIB188-008-Q1-E1-C10
gccatgggcccgggatacattacaaacaacgtaattctacaactgcgactgttcagcagatcatctatttattcacaaagcagtgttaacacattcaccaaacctgggatcagaacattactcatactaagaaagaaaacaaaaccctcaaaagtccatactgagggcaaaagtgagataaaacagaggatcatgagcggggtgaggaagattacagagcacactcaacagagcccagcaatgtagaacactaatgatgtcagaggatacctgatgcccccaaaacgtttctgtttaaacattctagctggcccatgccaggggttccagacctatctcatgatctccactacaggatccgtgttgctacagaagaggagagtaaaggccaaggggt

SEQ ID NO: 939 - DNA, 429 bp, Bos taurus
  unsure (403): Clone ID: 42-LIB188-008-Q1-E1-C6
accctttaaagtggacattgttctagatgagatttcagtaactggtggggacacagcaaccggctctgaggtgccagccacagaggccccaagcctgacatctcaccttctgaaaatcagtggcaccggaaatggagatggccgacttcccaagggggctgcgcttccaattctgtttccagttttccgaaaccagaacagtaagcagagaagcgcagccctgtgcggtccggcagccctctgccctctgtggcaagtggctgagcgaccctggactgggaccttgaacttcccagactccgaggtggacacagcaagccagcagagagctcatgtggtccctgaacaggtcatgaaaacgtcctctaaactacagatccggaagggctgcagaatggcctgnaatcctgcttaaaaacgcaatgcata

SEQ ID NO: 940 - DNA, 397 bp, Bos taurus
  Clone ID: 42-LIB188-019-Q1-E1-C6
acagttggaattgaatgtccagattacagaggcaatcgtcttagttctcagcttcagcaagaggggtcagaaatgctatggaatttagcaaggaaggatatgaactcaaaacctgaattcctagaagctctctttttacttgagaccatgttgggtggtccccagtatgtcaaacaccatatgattttgcctcatacccgatcttctgatttagaggttcagcttgatgttaacatgaagccattaccatttaacagagaagccataccaattgaagatgtagccaagttaaggcttaagcatgtgggagtcagccttaccgatgatttgatgaatcagctactaaaagggaaatcaaaagggcattcccagggggaaattgagtcagacaatgggc

SEQ ID NO: 941 - DNA, 394 bp, Bos taurus
  Clone ID: 42-LIB188-027-Q1-E1-C10
acattatttgtggattctatcaagcaatctctataccatatcctcctaagagcaagttctttttagagaataaatacccttgacacagcatgcctagaaaagagccagtctctggttcttacttcccttcccttttctctcttccccctccccctcattccctcggaagagctccttccttaaaccctaaccccttttgtaagcagtctttgaaaccgacaacttcaggggtgtttgttctctttataaaattgttagcatttcctgggacttctctgtttcttcatagagagttctccggttttgattttttttcccccagatgaccctttttattcattggtttgtgttaggggcaagtcagttcgctggggataggaaaatgttgaaaaac

SEQ ID NO: 942 - DNA, 411 bp, Bos taurus
  Clone ID: 42-LIB188-027-Q1-E1-C6
acccaggcagtgctcatgtgctggagtgtgtggaggcacccaggcgctccagcctgggataggagtctctggttttcaaaggttttaaggctggagtcgctacacctgccacccttcagccccacatggccctgatgacctgctttcctgaatgcctcgttcctgggccctctcgcctcccggaccttgcactatggcctcgactgagcccatatgccaaagatgctctctgaaccccactccaaagatgaaggggacggtctccaaacatcagtcagctctgaccttcttcgacttttcctcttgcttgcctgcctaccaagctcttgttcatacaccaaagccttagctaaaatgccctttccccaggaagccttctccactccgtctttggactctcccagctcgggg

SEQ ID NO: 943 - DNA, 376 bp, Bos taurus
  Clone ID: 42-LIB188-028-Q1-E1-C6
acttcgaaacactgagggggtaagaagcgacaggtgggtgccaaaggggccgcccagccacagtctttccgtgtcgtcctccgagcctgggtggcagaaggcctgggcatagtgccggacacactgctggttgatatcctgtttctcttccacccgcaggaaccagcggtcccccagcccaaacttgtgcccacagatccccgagcgaggccacaggcaacgtggcagcttcttctctatcatcacagtggtggctacaacctgcgctctccaaagctcatcccgctcgtgggctacacgccagtgagtgtcacccatcatagcgatgatgaggttgagcatgagcaaagtagcgatgattgctaaggcaacgtaa

SEQ ID NO: 944 - DNA, 449 bp, Bos taurus
  Clone ID: 43-LIB188-003-Q1-E1-C12
gccaaggccgcgggatactaaggctacactgtcttctcctaattctttgtcactagaaggatgtaaaatgactcctgaaccagaagaaacatccccactgtgtcacagaattatcaccaacacagatgacggagaaacagcaacaccagacgctgctgcactgagcccccgacttcaggagctcccagcctgtgggtcaggatggagcacggccctccacacgaaacccaaccgatcgagccaaggcatctgctgcttagtgtggcctgtctacctctcaggtgatttccaaacattctttcatcaaaaggtcagtttaagaataaaaaataacctgagaagaatgaagtgaagtttccaaaagctttgaggaaattaaaataacctttcctctctctgggctcccttcactgcagtccatgcgtcacagctcctactcctcctccctg

SEQ ID NO: 945 - DNA, 157 bp, Bos taurus
  unsure (61): Clone ID: 43-LIB188-003-Q1-E1-C4
cccgcagctatgggccacagcacgtcaccaggcgagcgcttctcggactctcagttcctgntgctcatgaaccgcatcctggccctgatggtggctggcgtctactgcatcttatgcaagcagccccgacatggggcacccatgtaccggtatcact

SEQ ID NO: 946 - DNA, 463 bp, Bos taurus
  unsure (444): Clone ID: 43-LIB188-017-Q1-E1-C12
ccgaggtgcatgcgccggacgccatggaggcgggatacacccatgacctcggacagagcactgaaagcacctggagaggctgtgtggcctgtttatccagcagcttccatttaattctttgtatttgcatcctcattcatccttcaggactccagagtttgttcaaatatctgattgtggggagctcggcccaagctacagggaaggcactgtatgccttggaagcaggttgagcacaaggagtatggctgtttaaacgttaaaaaaaaacaaaaaagttaaaaaactaaagttgaacactgcatgtcagttttactgtggtggatttcccctcaatgtcttcacagcaggactaagtgtgatggtcatggtggacagggcggtctgggctcaagaaacaggcagctaccactcaggcttccctgtgggctcatatcctcttanggcagctctggagctgaaa

SEQ ID NO: 947 - DNA, 442 bp, Bos taurus
  Clone ID: 43-LIB188-019-Q1-E1-C12
gccatgggcgcgggatacaaaagaactttactcgtgggctggataaagtgtcataactgctcatctatccacaggttgtttataatggagtggtaataaattgaaaaataaaacaaaattcttctggctcatttctccttgtcatgaatttctcccacagaatgatttcactgtggatgcagatcacctaggaccctattaagccagtgctctgatgtcatcagtctcatctcacaagcgataatcaagaaaggctgaggttcctgctccccaagaccactgaaaggaaactctggcaggttttcctcagctctcaactttgggctcacacaggaagccaaatttcaggtagcttcatccatgtttccttttctccttgccagaaatcacccccaaaggtaatgttctcctctggagcagactcctgtggtattgaaccata

SEQ ID NO: 948 - DNA, 399 bp, Bos taurus
  Clone ID: 43-LIB188-019-Q1-E1-C4
acagaatcatgggtgacatggatagaagacactgggataaaaggcatttcatttttcctatgcagcattttcttttggaaaatcaaggtgaccttcaaccaggacaaggaaagaaggaagaccctctgcatggggagctcagggcggctgtgggggaaagacccgagctgggctcgctcgggttctgcagctgaaatcgctgggggagtcggaggacagctcctgagttgtgcgtttccagttcccatccgtgaaatgctgtgtttagtctttgggtccgagtcgttgttctttggcaaataagaactatttgtgttccgaagcagaggaggacttcagcgggaggcgctcaagtggagctgcctcccggtcgctttcctacctgtgtcctcccagctc

SEQ ID NO: 949 - DNA, 460 bp, Bos taurus
  Clone ID: 43-LIB188-022-Q1-E1-C4
atgcgcccggacgccatgtacgccggataccctttaaagtggacatatgttctagatgagatttcagtaactggtggggacacaacaaccggctctgaagtgccaaccacaaaagccccaagcctgacatctcaccttctgaaaatcagtggcaccggaaatggagatggccgacttcccaagggggctgcgcttccaattctgtttccagttttccgaaaccagaacagtaagcagagaagcgcagccctgtgcggtccggcagccctctgccctctgtggcaagtggctgagcgaccctggactgggaccttgaacttcccagactccgaggtggacacagcaagccagcagagagctcatgtggtccctgaacaggtcatgaaaacgtcctctaaactacagatccggaagggctgcagaatggcctggaatcctgcttaaaaacgcaatgcatata

SEQ ID NO: 950 - DNA, 455 bp, Bos taurus
  unsure (159),(323): unsure at all n locations; Clone ID: 43-LIB188-023-Q1-E1-C4
catggctaggcgatacagacctcccacgtctttgagagcagctgcagatctcactgtcatccgtgttcctcgtgagcaaagaaaagctgggtctcaccccacagcaccagggtctcctgagcaccctgtggccatcagggagccgacaggctggggcangaagccgccctgtaaccacgggccggcgagggagggcaaacctttcctctgtgtaactcagacatgggagaaatggctggccgccacacaagctatgcattctactcggtgtttctcagtgagcttgatgtcctgctttggaaattggatgtgtctgtccgtcntgaaggatgcgtgtctatccgttccttggaaactttacagcagaaatcctcattccctttgcaacagatgtacgtgctgaccctgcactgtgcgctgtgctggccccacagcccaaccccggcctgcccctc

SEQ ID NO: 951 - DNA, 376 bp, Bos taurus
  Clone ID: 43-LIB188-024-Q1-E1-C12
gccggatacagttcagaaagaagatcgagttattagaagtcaccatgatgctcggaagcactagaacctcttctctagcagagaagggctactcagtctggcatgcagcatctggactgatggaccaagccacgcactgtgaaccctcctcagggagccaggaagggaggccacttcagctacagacaagcgagccagtgatttctgaggaagacacccaggaactggggcagatcctgaggaagctcaaaggtcttgcgttagacaccgagacagagctggagagacaggatgaggccttggatggcatcactgaagctgtggaccgggcgaccttaaacatcgacaagcataaccgacgaatgaagaaactgac

SEQ ID NO: 952 - DNA, 408 bp, Bos taurus
  unsure (363)...(364): unsure at all n locations; Clone ID: 44-LIB188-002-Q1-E1-C12
acaagcttttttttttttttttttttttctacgatcatggctgtattttccacaactccactgtcacaactgttgcagcacatcataaacatcaccacacagaatcacacatttctccccttcttccacgagttggtgatgacttgataggcagaaaccatggtatttacgatgggcatttatgaaacgacactggtgcaccacggtagcatacgccatgcagcacgcaggttatgcagcagcagtacagaactacggcagaacctgcttgttgccaccagttatgggggcagcagtggtgatgggaagcaagccctcttggacgctgggtcctccggtgggcttcttcgctggggggcggtnntcatcaccgagcagcagcagccccaaggctgtgttgatgaagtt

SEQ ID NO: 953 - DNA, 427 bp, Bos taurus
  unsure (343): Clone ID: 44-LIB188-002-Q1-E1-C8
accttaacggcgagttcgtggggggctgtgacattctcctgcagatgcaccagaacggggacctggtagaagaactgaaaaagctggggatccgctccgccctcttagatgacacaaaagaccaggactcgaagtgagggaaggcggcccgggcgaggggccgctggtgtcagcgtctcaccaccagagaagcctgacccgttcaggttcccagtcttcagatggctgcttgcgctggctcctccagtttgtaagcagccaagtgattttagtgtgtctggtgtttgggcaaggaagatcctatctcgaacataatcgtaaacactgtaccaagactactctnttgcacacatcggccagttcttccgttccaactacgtgttcctattccagcttccctggctgcccgagaagctgctatccatgt

SEQ ID NO: 954 - DNA, 400 bp, Bos taurus
  Clone ID: 44-LIB188-004-Q1-E1-C8
acagctcaaaagcacaacatcctgcaggggaggctcctttattccaggatttggcagaatttattttcatcttctacacatgagccaccaaagtaaaaaacaaaagtcactcctcttcagtaaagcagtgtcctcagttaaggataaggttttcatgtaaccttagggctctcagggcgcttctcgtgaagagcagccactataaagacgactatggagcaattttttcattcttcatgcatgagacataaagaatattatagaatagtccaagtttagaagtcactctcaaacatatatgtagaaaagttattgtcagaatactctcaagctttaacaaattgggaaagcctgtaatccttggactgtttcctaaaatcagtggctctaaagggtgata

SEQ ID NO: 955 - DNA, 384 bp, Bos taurus
  Clone ID: 44-LIB188-008-Q1-E1-C8
actttaattggcttgtttccggtattaccaatccatgcctggtctctagggttctcctcctcccctcgactgggggggttccacacttgggacaggtgcaacaagggggcacagtcaggcaggagtctgccctgcgaggggttcctagccgctgaggccccagccacaagcaggcgcgcatcaggacaccctctctaatgggaaaggccgggccccctgctcctccccaccagtgtgcatcatgtcctcgagagggtgggcgaaagggtgggtgtcagccttcaggtcactgcagcgggggcgcggacagcgaggcatggtcgaacaatgggttccgaacctccatctctcccgttggggccaagcccgggcactcgtatcact

SEQ ID NO: 956 - DNA, 222 bp, Bos taurus
  Clone ID: 44-LIB188-010-Q1-E1-C8
acaagctttattttttttttttttttttttttttttttagggatgttttaaagtggtaaactttattttaaaactatgtgctggagtaagcatgaaatttctgaaaactgattcctttgaaatcccccttcagatccaagtgtccaggtcctttcttgccaggtgacctgcaagactgaggtcacaccgtcaccgcctcgggccgacgcctgcagagcaggt

SEQ ID NO: 957 - DNA, 418 bp, Bos taurus
  Clone ID: 44-LIB188-020-Q1-E1-C12
acctgcccaggcggccgctcgaaccattttcttttttttttttttaaaagacagtgacgttggttttatggatcaaaaccagaattttcatgtttcacaattttggtgctagagatccccaaactgcctaactcactggggaaggtttctgaaggtgtgcattatagtaaacagcagcaaaatacccaacaacgttactgctaaaagcagctgctcctgcttgcgcctttagaatactagccgtaaaacagcaaaaacccgcacatctgtgtcagcagttgggatgtgagctactctaaacaacaaacaactgtgaacagtccaaggcaggacctctacaatcatactgggcaagcgctgagctgtggggagaaaatgtcagcacatgcccaagaggagacaatgcacacgtttagta

SEQ ID NO: 958 - DNA, 391 bp, Bos taurus
  Clone ID: 44-LIB188-022-Q1-E1-C12
accaatgagggcacctgctcacactcaggtgccacttctggtgcccacttgcttgtttggggatcacagtgatggttgaccagggctccctgacctatacaggcctctgctatgggggtgatggccagtcctggtgtctgagtgattccctgggcccagcaaagggaccaagtttccaggtcagcgacattggatgccttccctctgcctctgggagcggtgggttggcatgaggtggggtagcaacccaacctggcctgaggctcactctggaaactgcggggaaagggaagggaggcactgccttagctaacaccgttgaagtttctgatcttaaaagtctccgctgaatattcttctcccagagccttgaagacaaagggtaacaccc

SEQ ID NO: 959 - DNA, 444 bp, Bos taurus
  Clone ID: 44-LIB188-022-Q1-E1-C8
acatgattaagcagaaacaggcaagctcacactggaagattaactatctcagtcaaaattccgcttgtggcccccacttcttgatcgatttctattcccacttcgtcttctaccatcttgtcgacttcctgtccgactcccctgccgactctgtctacctgaccggccaccggatcgaccacctgaccggcctgaccggcccaaccggccacttgaccaaccactcctctgtctggaattagaagatgtgtttccatcataatattcttcaatttcaggcaacttggctggcactgagagtatccagtctgaatcatgccactctgcctgtaacctttctgattcatttgtggaaacatcaaagcatacaccaaaatttccttttaggaggcacattctggtaatctgggacacagcattactactcagctttctgttaagttc

SEQ ID NO: 960 - DNA, 437 bp, Bos taurus
  Clone ID: 44-LIB188-023-Q1-E1-C12
ccgtacgccatggcggccggatacaacagcaactacgctaccttcgccatcatctcggcattgctcatgctcaaccacctcatcactacttacgggtgctcctacattgagagtgctacctgtaatgaccagggattatgctctggaatatgcgcattgtatgtgtctaccagctgtcatgctgtatgcgaattgtcaacatagctgtggactcgctcagtgacttgtgggcacatatttgggctgggggatcgacggttcctgaaggtcaaagacaaacaggcttcgattcaccaacctatcatgcgcaatgcccactgcttctgcaagctatcctccgaagacgacactttatgacagtggctgggcaatccctttggcacctaactgtcgcttcctatcaccgcagtatctccaagtatcactaatgccgccgg

SEQ ID NO: 961 - DNA, 382 bp, Bos taurus
  Clone ID: 44-LIB188-027-Q1-E1-C8
actgaaagatcacctttctctccaaacccctagcaattaatccaagtccacagcttcagaaagccaggagttttgtctcttcagtctgctcctctggttacacatctttctttcaaggaagggaggtcaaaatatttcaaacagggaacaaaaccacagtggagcttccagctcatgtttctaagacggagcaagggaagaaccccactgacttcaaagaaatggacaatgttgagatggattacttctttacagccttgtagagggaagaaacactgtcctgtagaacacaactgactacaaagatttacaaatgaggatccaattgacagatgagaatccattggtaaatgcatgctccagctcctaaaaacgggaaggg

SEQ ID NO: 962 - DNA, 360 bp, Bos taurus
  Clone ID: 44-LIB188-028-Q1-E1-C8
acatttcatgcctgatggaaggtctgtggttgataccgttggaggaaagcggtttagggttttaaaaagaggaatgaaagatggatattgcaccgcagacattgaatacctggaagatattaaggttgagaatgaagatgaaatagagaacctccggcaacttcatgatttggtctactctcaagcctgcagctggtttcagaatttaagagacagatttcgaagccagattcttcagcactttggatcaatgcctgggcgggaggaaaacctgcaggcaatccctaatggaccggcctggtgttggtggcttcttgctgtccttcctgttgacccccgctatcagctgtcggttttgtc

SEQ ID NO: 963 - DNA, 399 bp, Bos taurus
  Clone ID: 45-LIB188-007-Q1-E1-D10
tgggcccgggatacataaagacattcccaaagtggtgacagaaggcgccgcagccaggccgcgggcagttgctgagaatgcgtttgtgcacctccacatgccatcagccccgccccgcccttgacgtggctgttggatggttcgacgtaagtctctttgggtagcaccgtatatgcattgcgtttttaagcaggattccaggccattctgcagcccttccggatctgtagtttagaggacgttttcatgacctgttcagggaccacatgagctctctgctggcttgctgtgtccacctcggagtctgggaagttcaaggtcccagtccagggtcgctcagccacttgccacagagggcagagggctgccggaccgcacaaggctgcgcttctctgctta

SEQ ID NO: 964 - DNA, 423 bp, Bos taurus
  Clone ID: 45-LIB188-009-Q1-E1-D2
gccatgggcgcgggatactcttgcatttactccttagttttacttaacctaaaggacaaactggatcgacttggtaaatgaacagatctaagaattagccttaagagataagggaccactcaatacttccaaagctgattaggcccttcaacacataggtgtatgtgtatatgtatacatcactacactaagatacagatctagccctatgggtatatatacgcatgtatggctatatagaaaaaactatgccaatactaaccaaacagaactttgtaagcggtcatcccaaagccataatcgcacactgggctgtgcacaaagccatgcattacaccatattcaccaacagaaggctgacttggctcaatctctcccaactgtggccctgtcctggtgaggcaatggaagacagagaggttg

SEQ ID NO: 965 - DNA, 415 bp, Bos taurus
  Clone ID: 45-LIB188-020-Q1-E1-D2
acgctggtcacagcgccccccaagttgggctcctgtcggtgtcttaggtgagggttccccatcgccccccgccccccacaggggctcaaaagtatcaagggaatggcggccacctgattccccatggagacaggcaaacggattttgactggcggccccagcggtcactggagccctgttccctgtgtcgcccgactatcaaggatgtgcaatgtcacatgtccatccatagcccaggcctgggggtggtgagtatcaaaaggaggaaagaatggtttgtgaagacaggcacgagatatatatatactactatgagtgtgcagttctaaaccacagttgcaggaggacacaggtatgattgtgggggagtactgcccgcagtgcaaacagcaccgcgaggcctccaagcagctgc

SEQ ID NO: 966 - DNA, 422 bp, Bos taurus
  Clone ID: 45-LIB188-025-Q1-E1-D10
gggacacataaaaacagaaagcgagcactagatttagagcaagaatatctgggttctaatatgcaaagccgcttaccagctacgagggctcaggccaagaacttcaatctgagctcagcttcctcgactgtaaaactaggctattaggacccgtgcagcccaccacacaggtttattgcaaggttcaaatgcaggaacaaatgaaaagtgctatgactacaacttaagagcaatacaagtataaatataacaacagcaatgaatttcaagttgaggaatactgaaccacacccttgggtatacccacgtattgatgggagtcgctacgaaagggacaaagatagctgattgccaatgagaacgaacacgctgcccttattagcggcaagaatgctgcaacagcccacagcccatccctgccg

SEQ ID NO: 967 - DNA, 227 bp, Bos taurus; identical to SEQ ID NO: 808
  Clone ID: 46-LIB188-001-Q1-E1-D6

SEQ ID NO: 968 - DNA, 413 bp, Bos taurus
  unsure (377): Clone ID: 46-LIB188-008-Q1-E1-D10
accactcgaggaggctgttttggttaacgctgcagggctgtgctcccagctcctctctctcctctttaccctgcattctctagtcgtaacaaacagaatcagctggttgagaagaaactcgcgcaactgaaaaaattaagaaatctacttcccttgaaggtggtgacagggtttctactagttctttctcactgtgtatcacgtttccacttacttaggaagtctgtttgattgcagctatgctgtcccgtaggtccacactagagctgatagtatgttaccctgaaccaggctgtggcagacaggacgagaagggcaaggggcaaagaggaaagaaggggaggggagggagagcagcctggctgccgggggaagcnagcacccctgctctgcacctaggaaacgcgtggggg

SEQ ID NO: 969 - DNA, 441 bp, Bos taurus
  Clone ID: 46-LIB188-008-Q1-E1-D6
gccatcggggcgggatacgggagaaggctgttcccctctcccccagtgcctcgggaggctgagactgggttgtgcgtcttgctctgcctaggtcccacagcaagaggagggctccgtgcaggggtgatccttatcacttgaagtcctctctggccagagtccctcaccttcccacagcccttgctaatgattaccataaaagctgcctccggcctggccttctagcctcagcccagtcaaaagtcccacctttaccatttgatttggtgtgtgcccttagagggaattcagagctccgttaggctcatagaggggcccagaccaaagatatggagggaggggtcccatatcagcaaacacctcaagtttcctgcactgtgactgcatttaagaagcaaagctttgtcaggtctaccagagcagctgataagcctgcagaat

SEQ ID NO: 970 - DNA, 425 bp, Bos taurus
  Clone ID: 46-LIB188-018-Q1-E1-D10
accttcatataacaccacataaataagtttagccacagtctaggctcacagcgtgatcactgggacaaaagaaatacttttctggcgattagacgtcatctgcagagagggtcgggatattcatccgaggccgcgtgaaaaatgccatcttctccctgaaagactgtacctctgggggctccttacagctctggcctcgaagcctgtgcacgtccttggtggctgacctcatcatcttgtctgtctgaagctctcccttgtgctctgctcggtccatccgcttctccagcatcctcagcagcaggcggaagcgctcgtcctcccgcacccactgtggcagctccttctccccgtggctcttggcttgttccagctgctccttgagctccttcagcaccgagatctcctgagtcagctggctgtgc

SEQ ID NO: 971 - DNA, 268 bp, Bos taurus
  Clone ID: 47-LIB188-001-Q1-E1-D4
tggccgcgcgatacatatattttaatgcatgcactgtgaccttggggggagatcggaaggtggacaaagtggacgacacccccgcacctccctgcgatctggctggcttcgctcacgtgtttaaaccccttccaagggcgcctgccctcaagatatagcctgtgtgctgctctcctcggcccattgcaccatcagcaccgtgacgttcgcccaccgagcctctcttaaccgacacttgtcagctccccatgtgctgtagcgtttgtca

SEQ ID NO: 972 - DNA, 326 bp, Bos taurus
  Clone ID: 47-LIB188-002-Q1-E1-D4
gctccagcctacatggccgcggcatactgtgtcacacagctgttggaagatttaatagtgaagtatctgcctgatgagctgtctgagagaaaaaaaatatatgatgaagaaactgctgaactctcacacttgaccaagaatgttccaatatttgtttgcactatggcctatcccactgtgccttgccctcttcatgtatttgagccaagatacagattgatgattcgaagaagtatacagactggaactaaacagtttgggatgtgcgtcagtgatacacagaatagttttgcagactatggttgtatgttacaaattagaaatgt

SEQ ID NO: 973 - DNA, 185 bp, Bos taurus
  Clone ID: 47-LIB188-003-Q1-E1-D12
gccaaggccgcgggataccaggttttattatctttttatcaaaaaaatcagtaacagacaacaatgtgaggtgctcactcccaacatggccagaggaaaagggacatggggggaggaagaggacccagccagctgggaccctggggtcacagaaggggagggaagcaagggtaactccctccagt

SEQ ID NO: 974 - DNA, 374 bp, Bos taurus
  Clone ID: 47-LIB188-005-Q1-E1-D12
acacacacaacagggctgaaccttttaacaagagggtctcccagcatatctttctgaaatgcaaatttgatggggaaaaaactttgtataaccttggcgagaaaaatgtctttaccccctcctccctaattcttgcttttactcttaaagacgagtatctatctgagccacccactgagcaaagtgctggtctggggccaaggcactctcatcaaaaggtgtctttgatgttcttgagctggcgcacagccaggtctacagggaggctgaacttgaggctgctgaggcggctgagcaagttgagggcgctctcaaagcctgtgtgtgccatgtagctccagggctggtagtggggctcgatgagcgaacccgac

SEQ ID NO: 975 - DNA, 348 bp, Bos taurus
  Clone ID: 47-LIB188-007-Q1-E1-D12
tgggcccgggatacccccatagggtcaggagatgtggtctggccagcctgagccactaggcctctcctctctgcataggataagccccagagccagggcctgatcagccctcccagtccccctttgtctagagggacaaaggtcatcctaaccaggctgagcctgtgacttattaaaccagtttagttctcaagctgtgcaggcaacagatgccagtgggctctactggtctgtctagtacccagcaacccacccctctggaaggagcactgtccttggacagcaagctcatccccacccatgaaactaccacttacacttcaggccacagtctgggggcagagcctg

SEQ ID NO: 976 - DNA, 385 bp, Bos taurus
  Clone ID: 47-LIB188-009-Q1-E1-D4
gccatgggcgcgggataccacctcaccgctggtgtaggtgagccgcatcaccatggtcaccagcaccatgcaggaataggtgatgaagaggacgtggaatggtcctccgagtatggtctgtccgaagacgcgactgagccccactcggaaaatgtctgtaatctctatgaacaggatgatgacagctccaaagatgctcaccagctcccccaccagtcggaggtggtcctggtgggtcacataggcctcctgaagtggcttctgctcccagatggtgttgtcccgggggtcagtttcattgtcagtcctgggcttgagggggcggtactcgcgcagctgccgcgccatgtcctgcttggcgttcctcagagcggcctccaactcg

SEQ ID NO: 977 - DNA, 422 bp, Bos taurus
  Clone ID: 47-LIB188-013-Q1-E1-D12
actgaaaggtcacctttctctccaaacccctagcaattaatccaagtccacagcttcagaaagccaggagttttgtctcttcagtctgctcctctggttacacatctttctttcaaggaagggaggtcaaaatatttcaaacagggaacaaaaccacagtggagcttccagctcaggtttctaagacggagcaagggaagaaccccactgacttcaaagaaatggacaaggttgagatggattacttctttacagccttgtggagggaagaaacactgtcctgtagaacaaaactgactacaaagatttacaaatgaggatccaattgacagatgagaatccattggtaaatgcaggctccagctcctaaaaacgggaggggcctggctcgacagcctggattataaaaggaatctgccaca

SEQ ID NO: 978 - DNA, 390 bp, Bos taurus
  Clone ID: 47-LIB188-014-Q1-E1-D4
acagagcagtgttgtgggtcggttccagagagcaggcatgaggtggggagtctcacacgggaagtttacagggaactgtccttgggatgcacacctgggaaaaaggaaggaggggtggggcaggaaggagctgatgggcctcagagttgctccagggagggagtctgaacacacccttcatcctaggcaggactcttcaatagggggaagctcccagagaggacccacagctgcagacagtgagccagcagcaaccaacccccacagcagctgggggataaagtccttcagggtagccaagcccatcacaacgctactaacacaatcacagatgagcacaacgagaggtatattcaatgagtgccaagcctggccgctcagtcacacaac

SEQ ID NO: 979 - DNA, 157 bp, Bos taurus
  Clone ID: 47-LIB188-017-Q1-E1-D4
aacctccttcccggggccttgtttcaagcccccaaaggaacgttaaccctttccaccttttgccaatcccttcctgggcaaggggtccaaaccagggcttttctgaacccccaggaccttgaaagaatccctataacggaaaagttccccttaataa

SEQ ID NO: 980 - DNA, 318 bp, Bos taurus
  unsure (79): Clone ID: 47-LIB188-018-Q1-E1-D4
ccatggcggccggatacaagatcctaaggcgggcgaggaagcgcaaggtgacctggggcccggaagcgcctcagcatcncctcctactgcctccaatcacctccagtcactggggtcagtgggaaagaccttcccagaacgtgtggtgatgagggtcccgtccagatcaaaaccagccaccttgccccgagccttcacaccaggtgctgtgaacaccagcagcttctcgaaggtctcccagccaggggatgacttccttatccgctttttctgctgctcaacattttcctcctctccctctcgggtcacgggaggggt

SEQ ID NO: 981 - DNA, 272 bp, Bos taurus
  Clone ID: 47-LIB188-027-Q1-E1-D4
gatactttttggaaacccgtggcaccttcaacacaggaagtatagggggttctctcccctgcttcaacccttcttttgatagcatatatatgaatggtccttcttgggtcagaaggtgcgggaaggaagttggagagttgagccaaagtcaaagcacctgaaggccagtttgagagcagcatctgttcaaggcttcctcaaggcttgtgtggtagacagcaagccccccggcagtcacctggttctctgaagctgcctggggcctctctggt

SEQ ID NO: 982 - DNA, 161 bp, Bos taurus
  Clone ID: 47-LIB188-028-Q1-E1-D4
atgcgccaagccgccatgagcccgggataccctttactcgaattggctgacgccgaaatctcccctgtgcaactaaaatgatgtggttcacccacatcttcatcctcagctcgctcaacggtctcacccgtattttctgaaactacctcacctacgggact

SEQ ID NO: 983 - DNA, 342 bp, Bos taurus
  Clone ID: 48-LIB188-002-Q1-E1-D12
acacgttttaattagttgtcagcaaaaattcacatgaaattgaacataccattcacttaaaaggttagaaatttttagtctggtgccagaaaaagaatggaatgagtatatttacagtaaatactttaaagcacattttcataagaattatcttttgagataaatgagaactgtgttttctttttgcaataaaggaagtgccccaaggcaccacagcaatactgacacagaggcaggtcttggagaagtccctgcactggactcctttcctcttggcccagacctaccataaatataccacttccttcacctctgggttctttcaggtgttctataaactgt

SEQ ID NO: 984 - DNA, 404 bp, Bos taurus
  Clone ID: 48-LIB188-006-Q1-E1-D12
actaaattatctcgcacagaaatccgtaggggtggaatggggagatgtaaatgctaatgagtataaaacttaatttcaacttcatataaaggaaaaaaaaaaaaaacgttgagaaaaaacagctttaaattgaatagtatctttgaaatcaacagctcaggccagcccttacatatctgaggttaatatacaaccagatttgggatcaaaatgaagatttagggtttacagttacttcaaatccagttttaagagtagccaagtcacctcatttccagaaagggaagtctctttagaatgactccaatattcttctgaagacacttagatagccagagttcctgggccatagttccacttttccacgacaccatgtcaatgctgtagtgtggacttcctctgaa

SEQ ID NO: 985 - DNA, 357 bp, Bos taurus
  Clone ID: 48-LIB188-008-Q1-E1-D12
acctgctgctcccccaaaaaatcaggttttttgaagggcttctggcataatttctaaaagaagggaaacactcactgaaatttagcacacccatgatttctgccaacatccccagtatttgggttttgtagccatgcacttcatctgttcagcatgttctgctgcatgtgctacatggaatgctttacttaagcgattaggcaaagtaaatgccacgaaaggttcaaaacccaaacaaagccagttagctgcacgatgcccaccctttgtgtggacggttgggtctggacagacccagcagccagcgccattctctgtaaagggaagggatgactcttaggctgggactctgcgttt

SEQ ID NO: 986 - DNA, 446 bp, Bos taurus
  Clone ID: 48-LIB188-008-Q1-E1-D8
accaattagacctccagaccaaaggtgcatacttggggaatggcaaaaacagaccaagccttctgagaaggactggtccttttacccttggttgcggcagaaactctctttgttgtgtgtcctgagtctatccatgtacctgttgtttcacatcctcagcactcccactccgcttcctgcactctctgtttgggcagaaggctgacgatacgatggctcgaaggccatcattgagactggacagccctgcaggaatagatgctgataagaggcagcatggacttggtctgcctggagtgacactcaggtcctgaggaccctgctcagctgccacagtggcctcgatcataccttcatgtcagaccctctgcatgggcactgctcactgtggaaggttctacagaaaagacaaggataaatgccaccccaaatgattattcctttgg

SEQ ID NO: 987 - DNA, 431 bp, Bos taurus
  unsure (417),(423): unsure at all n locations; Clone ID: 48-LIB188-011-Q1-E1-D8
acagcctgggactccaaggctgggcatcaggagcttctgcttcacagcccactgagacgtgatggggcggcagggtgggcgggccagaggctcggaagaccagagcagccggctcctcgaggcacctacgtgcagcagtgtcgcatgtggaagttgacgacatactcagcattagtcctctgcacagagatggcaaaaggctcgaaagggtggaaggtgaaggcaacgaggcgtcgcaccgtgtggttgatggggcggcccagtaagcccgcctgaatctcaaacttgagcagaccagagtcccgggcgtagaacctgatagggtggtctccgcaagtcttgggtcgctccatgaccgacacccacttgtcgtcgtagctaaagagagacaggtcaaggtaagggctgccgctgtangactgngcgctgat

SEQ ID NO: 988 - DNA, 250 bp, Bos taurus
  Clone ID: 48-LIB188-018-Q1-E1-D12
acattacagtgggtgccagtgtcaaaacaactccctgcacttcacaagcagcatgactatattgtggcagcagcagataggacttcccccggtgggcagacagtgttcacacagtgcgactgcaactagagcacagaccgacagaatcacatcttgtttcctttgcttttctcatcagtgaatacacaagtgaagagatgggagggcaaagcaatggggatttgtggcgctcgggtgttgccgtgcgggt

SEQ ID NO: 989 - DNA, 414 bp, Bos taurus
  Clone ID: 48-LIB188-019-Q1-E1-D8
acaccgagcagttacctctcagctcaggcagaggcccggtctcctaacactgctcctgctgggccagtggcacaatttccaagactgtgtttctgtgaagtagtgtaagatacagagttgaccagggaacccagctacacctggcaatgcaggcagaggggtgggggtccacctttaacaatattgccatgtcaacaaatacttttttgagatctactttgtgcaaagtatactaataaactctaaccaattcagttacagatgtactatttctttctctaaaaccttcagtcagggcctatgtctggaaccctaaaagtaatacttttaattcttaagactggctttaaccaaatcaggtgcccaactccttcaaactggggtggacgatagataatgagaaactgagttttc

SEQ ID NO: 990 - DNA, 447 bp, Bos taurus
  Clone ID: 48-LIB188-023-Q1-E1-D12
gatacatggcagacggattgttcttgactctggtgaagttgatacagcgtcccgtgtctcctggctgtggacgcatcacggacacacgatcgtagcctttccttagtaggacccacaaggcatcaagttttcccttgatcggagaataccactttcggggagaggagggccggcgcatgttgttgttgagatttcggggttcagggaactcatactcctgctctggcatcttgactcttgcattctttgctttctccaacttagcaccttcttctgtggagcccttttctccccaacgaacctccatccttttaatgcctccaacgcctcggccaccataataagaagcgtctaccgtaggccactttttcttaggcagaccatcatcatcttcttcctcactttcctcagcagggggtggagggacctccttgataatcacagtgc

SEQ ID NO: 991 - DNA, 374 bp, Bos taurus
  Clone ID: 48-LIB188-023-Q1-E1-D8
ggccgcgggatacatgaaaaaaagtagaagttttaaaaattcttcaggagtccaagctgggccatgactattactgatggggtttactcaaggcactgattccaagtttgacgaccatcagcaaactggcacctgcaatcaggcctgctggcatgaattttctagagttgtagaatctcatccccatgatgccagccaaggttccagatgtgactaagaaaagccaaatgttcttcggatcctgagacagctgataggaccccaggccggcgagaccaccgaagaggagcccggcagccacggatggaacactgcctgcctttgcataaccaataacccccccggaagcaaccagtgctgcatagccaaagcca

SEQ ID NO: 992 - DNA, 410 bp, Bos taurus
  Clone ID: 48-LIB188-026-Q1-E1-D8
acattatttcataacattttgaacaaggtttatattgactcaagtttaaaaacaaagtgtgactgaaaaatttttacagagtctagtgcaccaatgctgatgtgaggggttgtgtatgcgagtgaggaaaaaatgtgtattctggtggcctgaagctttactggacaaggatgtgtgaacgtgcagagatatatttagtgacacagtgtagagaggcaaaaagaaaaaaaagtaaaaattccaaatgtatattttttcttattgcccttcccttggcccccaaattatcacttcctgttactatattacccttgttattaggaactctaagccatgcggagcaccacccctcttcccccgtcagcctagatgccgccctcggttccatggcctcttgcagtgaccgtcaa

SEQ ID NO: 993 - DNA, 437 bp, Bos taurus
  Clone ID: 49-LIB188-001-Q1-E1-E2
cagatctgaactatcctcctgcctcctgcctcccaccaaagtccagatctctcacctgccaggtcaggggtggggtggttggggtttagaacagaatacagggaaaccgaggagcaggctcagagctcgccccaagcacagggcccagcgcgaatagggaccctgcttcacccaccctggccttaccgccctgtctgagcaaagcactttacaaaaggccgggatgccaccttgggcaccagcctccatccagggtcacagctgcagacagccgcagaggttcgggaggtgtacaccgagcagttacctctcagctcaggcagaggcccggtctcctaacactgctcctgctgggccagtggcacaatttccaagactgtgtttctgtgaagtagtgtaagatacagagttaaccagggaacccagctacacctggc

SEQ ID NO: 994 - DNA, 277 bp, Bos taurus
  Clone ID: 49-LIB188-002-Q1-E1-E2
accagatatgagctttcctcctgcctcctgcctcccaccaaagtccagatctctcacctgccaggtcaggggtggggtggttggggtttagaacagaatacagggaaaccgaggagcaagctcacacctcgccccaagcacagggcccagcgcgaatagggaccctgcttcacccaccctggccttaccgccctgtctgagcaaagcactttacaaaaggccgggatgccaccttgggcaccagcctccatccagggtcacagctgcagacagccgc

SEQ ID NO: 995 - DNA, 67 bp, Bos taurus
  Clone ID: 49-LIB188-004-Q1-E1-E2
acatcggcggaggtttcatagggacatcctatggcttggataacttgtcctttccgggaaacggaag

SEQ ID NO: 996 - DNA, 270 bp, Bos taurus
  Clone ID: 49-LIB188-007-Q1-E1-E10
gggatacctcttaaggaattgtggctgagaactataagagtccaatttgtccagccttatcaggaaaaggggctccagacccccaaactcaagatgccggaatcccagtggagaaactgccccggtgtgaagaggcaggatgtgggggcctgctgcgacctcacgtggtgtggtttggagaaaacctggaccctgccatcctggaggaggtggacaaagagctggccctctgtgacctgtgtctagtggtggggacttcctccgtggtct

SEQ ID NO: 997 - DNA, 259 bp, Bos taurus
  Clone ID: 49-LIB188-007-Q1-E1-E2
gggatacatatatattattacatgcactgtgaccttggggggagatcggaaggtggacaaagtggacgacacccccgcacctccctgcgatctggctggcttggatctcgtttttaaaccccttcctaccccgcctgccctctagatatggcctgtgtgctgctctcttcggcccagtgcaccatctgccccgtgacgttctctcaccgagcccctcttaccctacgcgtgtctgcaccccttgttctgtagcgtttgt

SEQ ID NO: 998 - DNA, 415 bp, Bos taurus
  Clone ID: 49-LIB188-013-Q1-E1-E10
accacctccccgctggtgttggtgagccgcatcaccatggtcaccagcaccatgcaggaataggtgatgaagaggacgtggaatggtcctccgagtatggtctgtccgaagacgcgactgagccccactcggaaaatgtctgtaatctctatgaacaggatgatgacagctccaaagatgctcaccagctcccccaccagtcggaggtggtcctggtgggtcacataggcctcctgaagtggcttctgctcccagatggtgttgtcccgggggtcagtttcattgtcagtcctgggcttgagggggcggtacagccatccaagatttcaaggaagaagaaaatacgttgtggggagaccaagtgtatgcgttgatgtgtgtactttcttagtcttttttttttttaacagagaaa

SEQ ID NO: 999 - DNA, 213 bp, Bos taurus
  Clone ID: 49-LIB188-013-Q1-E1-E2
acatgcttatgatggctgtgttctagaatacgatttggcatctgaaacgctgaggtgacgagtgaacaacagctgtcctctgggatacaggcacagttcgcttaatgccacatcttgtttcagaaagagacagagtcctattagcgaattgagcctttgagataagcgatgtacacaatttctcagcccacatcatctggatgagtcaacata

SEQ ID NO: 1000 - DNA, 429 bp, Bos taurus
  Clone ID: 49-LIB188-015-Q1-E1-E10
acgtctagcagcttggactttatacactatcaatgtcttgtgagtattctgtgtgtgttgggagagggaataatactgactggcgtatcacattgtgtgaaatttttgaaactcggagcaataatgccatgccgttgtgaatttcttccacacttctcaaattccgcatttaaaacatgtttctttatatgagctcacatcgcattaagccttgtcagtgttgcagctgctctgatgtgtggtgggatctgcactgtgtcacagtccactttacatgcgacgtaagactgagctcagtgttttggggaacaggcagtgaagcttatttatcgacttgtgtgttccatatcaaggtaagcaaacgttccactagtcgtttttactcatccatgaaattgtataccataggttactcagactgtccgaatc

SEQ ID NO: 1001 - DNA, 383 bp, Bos taurus
  unsure (376): Clone ID: 49-LIB188-015-Q1-E1-E2
gataccagagaaacctccctgggaagtggcggtggcggcaacgtccgcatcaacgttaaggagtctgtggacgggaaggtggttcttcaaaaaaaaaaaaaatctaaaagcccagtgcaggggaaatgcccctgccacccctgccctcccccagcctaagcagaaagctggcaagagggaccggacaagcaaattccaagctctgctttcacaaggtctggtccaaggggtccttcgtttcttaattgggtgccttcccgtgctctcccctgctccctccagctttcctgcctctgatagagcagggaggtgcaagtaacagctgtattgtgtaacaagttcatggtctgtaccgaatgggataacgacgttgtanggaaaat

SEQ ID NO: 1002 - DNA, 327 bp, Bos taurus
  unsure (126),(128),(243),(258): unsure at all n locations; Clone ID: 49-LIB188-016-Q1-E1-E2
ccataaccgccggatacctattttgcctgttgtaaattgcctttggtttattgtttttgtggccattattgtggtgtctttgccatcaaagccgaggatcatgtttggttctgcataagatcacananggtgacaatcatgaggatgtccccttctccataactacgaacttcagaatttctcagaaggcgtttgcgagcttgctaataaagaatgtgattcctttatggttcaataccacangagtctgctccagangagaacattacctttgggggtgatttctgccaaggagaaaaggaaacatggatgaagctacctgaaatt

SEQ ID NO: 1003 - DNA, 177 bp, Bos taurus
  Clone ID: 49-LIB188-023-Q1-E1-E2
tttactcaaaataccacatattcataacctttttgggacccactttcttccattagtcacttgattcacagtctcaagttcttcgtcaccttagtaacaaacatagagggacagcctcattccgacatacacttatgtaagttgctatgtcagtgagctctcaggtgccctgtagga

SEQ ID NO: 1004 - DNA, 241 bp, Bos taurus
  Clone ID: 49-LIB188-024-Q1-E1-E10
ccggagacctgttaaaattaagaagggtaggtgccaaaattccacaggactctcaggcatacatcagagctgccgccaccatgtggatgctgcaggtagagcacatcatattacgctgcacagcagtcgcttcttctcatgaacatgatagatgaatgatcctctgaactatgtctagcatagtcgtaattaaggtagctgatgttgatacatctcacgtatatcttcatttggcaaaatt

SEQ ID NO: 1005 - DNA, 127 bp, Bos taurus
  Clone ID: 49-LIB188-025-Q1-E1-E2
ctcattcactgaagcaggagcaatcggacctcagcaaatcccataccacatctcttcctttcactagcctcgcctgactttcttaatgcacgaacccctgtagattgacaggtgttcttacgggact

SEQ ID NO: 1006 - DNA, 433 bp, Bos taurus
  Clone ID: 49-LIB188-028-Q1-E1-E10
cgcatggcccagccgccataggcgcgggatacggcaacatggggctgcccgacatcgacagcaagatgctgatgggtatcaacgtgacgcccatcgccgccctgctctacacgcccgtgctcatcaggttctttggcaccaagtggatgatgttcctggctgtgggcatctacgccctcttcgtctccaccaactactgggagcgctactacacgcttgtgccctcagctgtggctctgggcatggccattgtgtctctttgggcctccatgggcaactacatcaccaggatggcccagaaatactacgagtactgatcttctctgagggccctgaagccctaatacagctggacccaccccagatgtaaaagagacatagttgcagctaaaaacttaagccttcacgccaagactagtctctgcatatcatg

SEQ ID NO: 1007 - DNA, 428 bp, Bos taurus
  Clone ID: 50-LIB188-004-Q1-E1-E10
accttatgccactatctgctgaccccgagacctctcctgtccaaccacactgatgaggtaaagccaccgagcaagcctgggccagctgcaggctctgcctcgtgtcccctgagccctccactcctagggcactgggaccatccctccacagaccccggcctggatttctggcccctgggagtgcaggaggcccatgtgaaggctgagcccctgcctgcaccttgggctgggaattacgctgctgcccctctgcccttctctgagcactggctccctaggaagggacctaggctgtgggctgccgtggggctcaccctcggcaccccagtcagtagcctcttcaacagctacccagcttttccaggagagatctggtggccacaagaggattttgcacgatggcccttactccttcagccccatgcacg

SEQ ID NO: 1008 - DNA, 264 bp, Bos taurus; identical to SEQ ID NO: 919
  Clone ID: 50-LIB188-006-Q1-E1-E6

SEQ ID NO: 1009 - DNA, 227 bp, Bos taurus
  Clone ID: 50-LIB188-008-Q1-E1-E6
gatcccgaaacgccgtgtctaagattcctggttctcttcgaacaccggctcggtggacatctgatgactctgatggtctgccacttggcaatcttcaagttctccggagctcttttcagtatcttcatcattcgttcatcgttgctctccgtactgcggcacgtcaccattgtgtatgcgcagctcaatcaacttcatctccactgtatatcctgtcgcttccaggt

SEQ ID NO: 1010 - DNA, 264 bp, Bos taurus
  Clone ID: 50-LIB188-020-Q1-E1-E10
actttgcgagaggattccagatgctgggccccttcaccatcatgatccagaagatgatttttggcgatctgatgagattctgctggctgatggccgtggtcatcctgggctttgcctcggccttctttatcatcttccagacagaggaccccaatgagctgggccatttctacagttaccccatggcactgttcagcacctttgagctgttcctcaccatcatcgacggcccccccaactacgacgtggatctgcccttcatgt

SEQ ID NO: 1011 - DNA, 411 bp, Bos taurus
  Clone ID: 50-LIB188-020-Q1-E1-E6
actcttaaattttgtgttaggttgtggttttttgttgttgttctcttttttggctgcatggcacgtgggatcttacttccccgaccagggatcaaacccacactccctgtatgggcagcaaaaaatcttaaacactggactgccagggaagtctccagttttgtgtttattgatagaagtattgagaaggaaaaatggcccaatatgctcatcaccctgataacccaccattttcagtaatacatatgctgtttgaaaagttaacagtcttttttttttttttattttcatttttttttaacaagaaaatattttaatacttttgtagcacaaaattaaactgagacaggttaagaggaatgtgaggggatctagaaaaccataaattatgtagctttattttgccataac

SEQ ID NO: 1012 - DNA, 256 bp, Bos taurus
  Clone ID: 50-LIB188-021-Q1-E1-E6
gccatgggcgcgggatacatatccaatgcagagacactgttctgtctcgaacagtgacgagggtgtcagtcagttgggcatgggaagacaagtcctcgtgtccgctgagtccaccggggagcttcatgcgcgcgggctgggccacaacgcagagccccaacacacacagcagcgtgttcaaaaaggttatgagcgtggaaccatccgtgatgacggtggattttacagcttaggctctgaagtacttatactctgc

SEQ ID NO: 1013 - DNA, 437 bp, Bos taurus
  unsure (380),(382): unsure at all n locations; Clone ID: 50-LIB188-022-Q1-E1-E6
acttggatgtttttcccccactttaaaaaaaatcttttttttttttttttttacccatcttaacattgaaacactgctgtgcccccttcccctagcgccggagcagcctgagagccaggctcattcacagtaacggttctgaccagtcctccgggccgcactgttcgagacagcggggaggaagtggatgtcccacctttggatttaaaaaaaaaaaaaaagcggctcacagctcagctttcccgagtaaaatggccatggcgcctcgcagcgggcgagagtccgtttgtttttttgtttttttttttacaaaaaggcagaattctcggctgcaaaacgtggaatcacaaatgggagagaaatgatggtgggggggggcncnccacccccggtgtctttggaaaggccagtccacagattcggcgggcggggaaggg

SEQ ID NO: 1014 - DNA, 410 bp, Bos taurus
  Clone ID: 50-LIB188-026-Q1-E1-E6
acccaatggagctctatcccgccttctttggctattacttcttcaatttcatgatgggagtgctacagctgctgcatatcttctgggcctacctcattttgcgcatggcccacaagttcataactggaaaggtagtataagatgaacgcagtgaccgggaagaaacagagagctcagagggggaggaggctgcagctgggggaggagcaaagaaccggcccctggccaatggccaccccatcctcaacaacaaccatcgtaagaatgactgaaccattgtccctgctgcgcctcagattaacgtataaagccaaggaaataccccaccctccccacagggtcactttaagctctggggagaaggagaaagcgataggagcgtgttcttctctgtgccccaccccctgcta

SEQ ID NO: 1015 - DNA, 338 bp, Bos taurus
  Clone ID: 51-LIB188-003-Q1-E1-E4
tggccgccggatacttcgagacactgagggggtaagaagcgacaggtgggtgcaaaaggggccgccaaccaaaagtctttcgttgtcttctcccaaccctggttggaaaaaggcctgggcatacccccggaaaccctgctggttgaaacccggttccccttcaacccgcaggaacaaccggtccccaagccaaaacttgtgccaacaaatccccgagcgaggccacaggcaacgtggcagcttcttctctagcatcacagtggtggctacaacctgcgctctccagagctcatcccgctcgtggactacacgccagtgagtgtcacccatcatagcga

SEQ ID NO: 1016 - DNA, 374 bp, Bos taurus
  Clone ID: 51-LIB188-008-Q1-E1-E4
acatggatgaggcgactggagctgggtgggtcatttataggcttgatgtccacggatcatgcttatgctgcagcagacatttgattgaggtcccaggcctctgaaagagtgccattaccacggaatgaaagggtgctgaactctgtgactgaggggataacgtccaagattgtatccctgggtgagccgccacagttcaaggtgtatctatggcccaaggaaatggtatccactgttatcctgtggctgcatggtctgtgcctgtgactgaggaatcagtgtcaccatcaaatgcattggtgtttgggggactacagtgcatccagttgtggacgatatctctgggaaagcctttctctgctcgaagctgctga

SEQ ID NO: 1017 - DNA, 125 bp, Bos taurus
  Clone ID: 51-LIB188-009-Q1-E1-E4
gatacccgtccaaactgccgtcatccattaacacattgaagaaccgggcttactcatcacttcggggatgccccggtttcacttcaacatgttcaagctcacagccgataaccaccacagcatca

SEQ ID NO: 1018 - DNA, 288 bp, Bos taurus
  Clone ID: 51-LIB188-013-Q1-E1-E12
tggagagcgcaggttgtagcaccactgtgatgctagagaagaagctgccacgttgcctgtggcctcgctcggggatctgtgggcacaagtttgggctgggggaccgctggttcctgcgggtggaagagaaacaggatatcaaccagcagcgtgtccggcgctatgcccaggccttctgccacccaggctcggaggacgacacggaaagactgtggctgggcggcccctttggcacccacctgtcgcctcttaccccctcagtgtctcgaagtacttgtcctctgactc

SEQ ID NO: 1019 - DNA, 386 bp, Bos taurus
  Clone ID: 51-LIB188-015-Q1-E1-E12
aaatatacaagtgaaaaacgaggccaaaaacctgggtgtggggaggggccacttggtcacaaacacaaataaacatttctgagttcttcctttggtctgactacagccccctctccccaggagagggggtgcagagctgggacctggagatcagaccccagtcccagccctgtcccccaaaatacgcagggttggggggcaggcacatctggagcagctggcgctatctggctcgctctggctttgggatggtggggagaacgtggagatgagggagccccttccttttccgagacccctggctgagtgggctgggagcgctgggggtgtgtggggttggcaaagtagcaatggcagtatttggggagtgaatgaaataggtcaag

SEQ ID NO: 1020 - DNA, 242 bp, Bos taurus
  Clone ID: 51-LIB188-017-Q1-E1-E4
ctaaggaaattctcaggccacttgataaaaaaccggccaaaaaaatgtgcttgtcacaaaatcaggaagggtctgcaggagaaggacatggtttcgctgctacgggaacagaagcgcacgaagaaactccgcaagctgctcaagcgcctacagaacaatgacacgtgcaacattccccggtcccacgttgctcaccaacgataccaacaactggcaaacggaacccctctggactttggggc

SEQ ID NO: 1021 - DNA, 389 bp, Bos taurus
  Clone ID: 51-LIB188-027-Q1-E1-E4
ccatggggcgggatacacgttcacatctacataggcaaaggtctctctttgccccctttctgccaaaactagccttttaacccttgccggcattctgtggcaaacagtggggttagtgtatctgttggctttacaggaagcaagagagcatagcgccagctgggtattcaggaagccgcccaggacccagtccagtggccacgaaagcacttcactacaggcccaggtcagtgtttgaggactcatagggttgtaaccaggcgtcactgtcctcctcttcgaggacgtgtttctcaccaactggtaatgggcacatggtgagcggatctgggtgttcgctgccatcgtgggctctaagcctgaaatatgcccaaaacaacccccggaaa

SEQ ID NO: 1022 - DNA, 433 bp, Bos taurus
  unsure (10): Clone ID: 51-LIB188-028-Q1-E1-E12
cgcatggccncagccgccataggcgcgggagactgcatattccattatcgagagggaaagaaacaggctttgaaggctcttgctcgtcaacagcacgtgtgtctgtagttgtatattgtgcatgtatttgtgtagatttaaattttctcctaagattttcactgacagtgtcagtaacttcaggggctttcaaagcattaaaggttgaagcggtgaatttttcacaaatgctcatgttagagagaagacccaaccccttccttaaggaccatctatctgcttcaccatctgaggatcttggaaatgttttcaaggatgtgtaaaaattaaccgcagggatgaagcatatttctctgacagccaaacttgagttcgtcaaagagcagatgcagagaaatctggtctggcttgccctgtgactggggccgctgcc

SEQ ID NO: 1023 - DNA, 463 bp, Bos taurus
  Clone ID: 52-LIB188-003-Q1-E1-E8
gccatgcgcggcgggatacatatctaatttgtaacatacaaccatagtctgcaaaactattctgtgtatcactgacgcacatcccaaactgtttagttccagtctgtatacttcttcgaatcatcaatctgtatcttggctcaaatacatgaagagggcaaggcacagtgggataggccatagtgcaaacaaatattggaacattcttggtcaagtgtgagagttcagcagtttcttcatcatatattttttttctctcagacagctcatcaggcagatacttcactattaaatcttccaacagctgtgtgacacagtacagagaacaaaattatccatttacaagtgatttctctgctttcacattcccaccacacatttttttttttaatgttttaaacgttagattatttcaagaaaaatacttttacaaaatcatcagttactacattttttccttttt

SEQ ID NO: 1024 - DNA, 432 bp, Bos taurus
  Clone ID: 52-LIB188-004-Q1-E1-E12
actaggaggtcccctgaggctccccagtcacgtcgaagggactagcggtgtttcccatgagttcaggacagtgcttcccatgccaagtccatgggaagtaacaattttgggagtgacagttgaggctggtgctttgctagcacacttggggctgacagatgcttgctgtgtccagggctactcttccaagtctgaaacccccaagcctccacactgtgcctccagcctcctgcctccaggctggaatcttgtgcacattcatgcctgctagggacagacagaaatcctccacaaaaccagacatgtcagcatcagaaaaggctctgatggagacaggatgaacttcagaatgggcttagcctggacctcaaactaattctagtgataaattagtggaaagagaaagaagacaatagcaaaagcagggacact

SEQ ID NO: 1025 - DNA, 386 bp, Bos taurus
  Clone ID: 52-LIB188-011-Q1-E1-E8
acagtgataaatctcagatcacggtctttttcagcttttaattagttttccagggactggttctagcttgaagtcctatgaaatatgtggcttgagtagaatctgttggaagagagggtgcgagtgaggcttatgaagtcagacgaggtatatgtccatgacagattctgtccaaactagctgttccattatttctattttcttcctcattcaaaatgattcagtctgaactctgctgtttctctcctcacctaactgatgaaatgtcagtgcctttgggagctaaattaatttttttccttcctcctgtgtctctgcatctcgtgtccagtaactgttccgccgtcttgaattttaactttatttattttaattaagggtgtgct

SEQ ID NO: 1026 - DNA, 391 bp, Bos taurus
  Clone ID: 52-LIB188-012-Q1-E1-E12
acagcctacagacttgttccacagaacagctgtttcttgcaaatccctgctccaccaacatggcacgaatgcctgtccagggatacatggcggcagagacatcaggtaatgcaccctacactaacaaatccagaattgccgccccttggaccacaacactcatctggataatgcgataaccgtggctatctatgccgtttcacggtccctcgggctcagctttctgctcagcctaaggagggcacgggtggcacgagcatctcccctgcatcgggctgtgagatttcacactttctgtcagaaaccagcttctcgtctaaatactcctcaacgttactccggtcttttgcgctaattctacatcccaaggaagtttcgctggatccaacac

SEQ ID NO: 1027 - DNA, 248 bp, Bos taurus
  Clone ID: 52-LIB188-012-Q1-E1-E8
actccgtaatatttttgggcaacctggtaaaggtattgcccaaggaaggccaaataagcacaattgccaagcccaagggcaaaactgaaggcacaaacctttagtaacgctcccaatagttggttgagacgaataaggcgtagatgcccacaggcaggaacatcatccacttggtgccaaagaacctgatgagcacgggcgtgtatagcatggcggcgataggcgtgtcgttgatacccatcagcatc

SEQ ID NO: 1028 - DNA, 263 bp, Bos taurus
  Clone ID: 52-LIB188-022-Q1-E1-E12
acacagctcatcagtctggctgatttcctgctgtgaggattaaggtgtagcccgttcacattacttcaaacacgtcacaagtttaagtccacacacatccctggctttccacagagaactatctggactgctgcggccattcaatgacaagctgagtgcctgtctagatgtctgattggtcgtactggtcacatgtctagagaaatgctagaccttatcctcatgaccagaaggggagaggtctatttacactggtgccactc

SEQ ID NO: 1029 - DNA, 396 bp, Bos taurus
  Clone ID: 52-LIB188-023-Q1-E1-E12
acatacctaactgctacacgttgaacattaagtatctttcttctttgtggctttatttttcccgcttttttcttaattttttttccatgatcttgtagcaatagtttttttaacaacatcttcactgctaagtcttcggtgtccagtcacatgaaatggtgtgaatctgtcccccgggaaccctggttttcctgaacgcgcttctgtatgtgcactacagttacaacagctcgtcacctctcagaaggggatcgtccacgactcgacagcaacggccggaagggaaagcaacactgttccaccccagagctctgaagcagcgcatctgccttctgaacatacgtttctgtacgacagaactcttttaatatttgacagtatttcgttaacttcctt

SEQ ID NO: 1030 - DNA, 305 bp, Bos taurus
  Clone ID: 52-LIB188-023-Q1-E1-E8
ataaatcccgatagtgaatcatattatagaagtttaacagacatttagtgtgtgtttttccgtgaaagttcataatggtctaagccggagttaaaggttttcgtctgcacaatcacatgactcaggatgtttacgaaagcgaatacagattacgaacagtttccttacgttgctgaaatcagtactggatgtgcaaaggttacggacattcaggccgtcaacgcagccagattacggtagtttcagacgacgatcgaggcaattggatatttagataggtcactggaaaaaaaaatccgtccacc

SEQ ID NO: 1031 - DNA, 311 bp, Bos taurus
  Clone ID: 52-LIB188-024-Q1-E1-E8
gtgagtcgtattaagtggttgagaccgttggaggacagcggtttagggtttcaaaaagaggattgacagatggatattgcaccgcatacattgaatacctggaagagaggaaggttgagactgaagatgaaatgtagaacctccggcaacttcatgatttggtcgactctcaagcctgcagctggtttcagaacttatgagacagatttcgaacgccagagtcgtcaggactttggatcaatgcctgggcgggaggaaaacgtgcaggcgttccctaatggagcggcctgctgttggtggcttcttgctgt

SEQ ID NO: 1032 - DNA, 416 bp, Bos taurus
  Clone ID: 52-LIB188-026-Q1-E1-E12
acatttcatgcctgatggaaggtctgtggttgataccgttggaggaaagcggtttagggttttaaaaagaggaatgaaagatggatattgcaccgcagacattgaatacctggaagatattaaggttgagaatgaagatgaaatagagaacctccggcaacttcatgatttggtctactcgcaagcctgcagctggtttcagaatttaagagacagatttcgaagccagattcttcagcactttggatcaatgcctgggcgggaggaaaacctgcaggcaatccctaatggaccggcctggtgttggtggcttcttgctgtccttcctgttgacccccgctatcagctgtcggttttgtcaatgaagtcattgaaagaacggttgacaaagatacagcatatactgacttattttt

SEQ ID NO: 1033 - DNA, 400 bp, Bos taurus
  Clone ID: 53-LIB188-001-Q1-E1-F2
tgataatgtagcatttgatatggaaaggctcaccagaacccaagcggttaaccgaagatcggccctaggtgagctcgccagcgacaactcccttggccttgagccacttcgcacttcggggatggcgcctcttcctcaggatggcgagctcactcctcgaacaggagagatcaacatcgcagtaacagaagaatggtttattattgccagttttggcctcctcagtgccctcacactctgctacatgatcatcagagccacagctagcttgaatgctcatgaggtagaatggttttgaggaatgaaaaacactgctttctgactgattgccttgaatgaaaatagaacctatttttgtgcatcatttacgaatcatgccacactagcatttacttttagt

SEQ ID NO: 1034 - DNA, 404 bp, Bos taurus
  unsure (343): Clone ID: 53-LIB188-002-Q1-E1-F2
actgataatgtagcatttgatatggaaaggctcaccagaacccaagcggttaaccgaagatcggccctaggtgagctcgccagcgacaactcccttggccttgagccacttcgcacttcggggatctcgcctcttcctcaggatggcgagctcactcctcgaacaggagagatcaacatcgcagtaacaaaagaatggtttattattgccagttttggcctcctcagtgccctcacactctgctacatgatcatcagagccacagctagcttgaatgctaatgaggtagaatggttttgaagaaagaaaaacactgctttctgactgattgccttgaaggaanaaagaacctattttttgtgcatcattttaccaatcatgccacacgagcatttatttttagt

SEQ ID NO: 1035 - DNA, 135 bp, Bos taurus
  Clone ID: 53-LIB188-003-Q1-E1-F2
aaattcacgaggacggtccctgactgaatatggccagggccgcaatcacacaattggttgggaaacgtgcccccctgaattggacaccagtctgggaagaatttggaaagatgcactataaagacatcaggtcaa

SEQ ID NO: 1036 - DNA, 340 bp, Bos taurus
  Clone ID: 53-LIB188-005-Q1-E1-F2
tggccgcgggatacagtgtttacgattatgttcgagataggatcttccttgcccaaacaccagacacactaaaatcacttggctgcttacaaactggaggagccagcgcaagcagccatctgaagactgggaacctgaacgggtcaggcttctctggtggtgagacgctgacaccagcggcccctcgcccgggccgccttccctcacttcgagtcttggtcttttgtgtcatctaagagggcggagcggatccccagctttttcagttcttctaccaggtccccgttctggtgcatctgcaggagaatgtcacagccccccacgaactcgccgttaaggt

SEQ ID NO: 1037 - DNA, 272 bp, Bos taurus
  Clone ID: 53-LIB188-006-Q1-E1-F2
tttgttgtcactcatggcaatcggacttcaattgttgaacggatattctacacccaccaactcgacctctcgactgaacactgcatcggtgaagtacacgggcacagtgtaatgcgacagactgactcttacatgggacgaatgattcctatccatggtgctatcggtctccatctaatcaaggacgtatttagctgccgttttcaatgggatcacccttctgattcttgctgaactactcgttttcagcattccaattgtctatgagaagt

SEQ ID NO: 1038 - DNA, 229 bp, Bos taurus
  Clone ID: 53-LIB188-007-Q1-E1-F10
gggccgggatactgccaacattcccagtctagtgacagaacgcgccgcagccagcccacaggcagttgctgagaacgacgtagttcaccgccacaatccagcagcctggcaccgctgttgacatgggcgtatcgatggcacgacgatattcacgttgggaagcgacgtatatgcactgccttcttgcgcaggacaccattccactcggcagcacatccggatcagttgt

SEQ ID NO: 1039 - DNA, 320 bp, Bos taurus
  Clone ID: 53-LIB188-007-Q1-E1-F2
atctgaactttaaaagcgcctgggaggaacagggaacttggttgagacatttcatagcagcatcgctcccttcccagggcaggaagcttcggccaaaaattcctgccccctcggaaaaggggccacgacctcccctgggctcatacccggtcacagccttggggggaatcggcaccggccccagtcaaagggcaagccagacaagatttctcggcatctgccctttgacaaactcaattttggctgtcagagaaatatgcttcatccctgcggttaattttacacatccttgaaaacatttccgagatccccagatggtg

SEQ ID NO: 1040 - DNA, 438 bp, Bos taurus
  Clone ID: 53-LIB188-015-Q1-E1-F10
acacttcggcgagtgagtgaaggtagcgctcattcctgaacgaggaggacagaactggcaggacaagatccagagaggcgttagagtgtagcccagccaaagcggcacagacatcccagcttcccccgggaagttattcaggacatcagacagacttcatttccaaaagcaggcccccaataaaccctgacacgaagggtggacacaatgaccacagatatccccttcaggggttggagggtcaccacgaaagtcttcaacgaaatatatgagcctctatccagctacaggctggggtccatggctcagcccaggggctggctacagggcttctctgtccaaggagaggcaaaaaaatgccaggccggccagccggccctttgcatgcagcctggagaggagccctggccaaaggtctccggctggctgtctctggct

SEQ ID NO: 1041 - DNA, 264 bp, Bos taurus
  unsure (209): Clone ID: 53-LIB188-016-Q1-E1-F2
aagccgcaacaattggcaacaaaggcccaaaaggccggccctaaacctgccgggtggccaatttgaacccccttaaaccggccttgaaccgggtcggcaacccgttcggcaatgctgtcaaactgctcccaatcctcactgtcaatggtgctgttctgccacccaatctgtggggtggataaccgctcatcggttttcagtggcatccntccactgtgactggtcccttgggacaaaacccttcaacttttccaaaaggaacta

SEQ ID NO: 1042 - DNA, 369 bp, Bos taurus
  Clone ID: 53-LIB188-021-Q1-E1-F2
acagtgttcatcccctttaagttaaaaaaaaaaaaactctggcagtcaataatttccagtgggctggaggtttaaagcatagaccctgggtccctaggccccgcctggtgctcagcctcacctgagattggctccagaatttttgccaggcttattaaaaacccactgcctaaatgccatcttaaaggaaacaagggatggaatacgtccatcccaaagactctttgcagagtctttgcggcaaagaaccacagggtcttgaagacaactgtctcaagtatttgtgagggacaaggatatggccctccagcttcaatgttaaaaaatagtatctcctgcctttgctgggaagaaaagaaaatggccact

SEQ ID NO: 1043 - DNA, 260 bp, Bos taurus
  Clone ID: 53-LIB188-022-Q1-E1-F2
acatctacagtgggtgccagtgtcaaaacaactccctgcacttcacaaagcaggcatgaacaatatttgggggaagcagcaagataaggacttccccccggggggcaagacagtgttcacacaattgcactgcaactagagcacagaccgacagaatcacatcttgtttcctttgcttttctcatcagtgaatacacaagtgaagagatgggagggcaaagcaatggggatttgtggcgctcgggtgttgccgtgcgggt

SEQ ID NO: 1044 - DNA, 405 bp, Bos taurus
  unsure (170): Clone ID: 53-LIB188-024-Q1-E1-F2
catgacggccggataccattttacactggtgattacccagtctgacaatgtcaaacttaatttaccgtcaaggacaagggagactaagaagaaatttatgaagtccaattcattttggtttttgagattcaaagtgcttaagattttggagtttttcagattaactttantaaaaaaatcaataaccaaaataccccaaagattagacagaaaacaactggttaaccattaaaaattatccaactcttattagaactttgcttagtctgcagaccaaggcaacgtttcttaagcaagacggttcggttgagaaaaacgatctcttaggggaaaaacaaaaccagagtggtctcagccactccactgcatctctcgggtcagaaacagaacaacggacaacaactc

SEQ ID NO: 1045 - DNA, 376 bp, Bos taurus
  Clone ID: 54-LIB188-004-Q1-E1-F10
cgggatacacccccacaatcatacctgtgtcctcctgcaactgtggtttagaactgcacactcatagtagtatatatatatctcgtgcctgtcttcacaaaccattctttcctccttttgatactcaccacccccaggcctgggctatggatggacatgtgacattgcacatccttgatagttggacgacacagggaacagggctccagtgaccgctggggccgccagtcaaaatccgtttgcctgtctccatggggaatcaggtggccgccattcccttgatacttttgagcccctgtggggggcggggggcgatggggaaccctcacctaagacaccgacaggagcccaacttggggggcgctgtgaccagcgt

SEQ ID NO: 1046 - DNA, 348 bp, Bos taurus
  Clone ID: 54-LIB188-005-Q1-E1-F6
acataacatattcttgtttgataatacagttgttacttgcatctcccagctctatcatacgcacgtgtcctgttgggagcaggggagatcactgtagtcacccatctactactcaactgacctttggtgcaccccctctcatagcatggcctgccatttactgttcctgtccctctgtccagctttctgctcatccttctgagggtacgtgttctaggggcatctctcctgcattgcgctgttagtgttctctcattctgaaacaatccaccttcccatcgacatactcttcaacgttaatgctcatattgcctttacctcgatgtcccagggatgcatcactggtag

SEQ ID NO: 1047 - DNA, 413 bp, Bos taurus
  Clone ID: 54-LIB188-006-Q1-E1-F10
gacgggcgggatacaaggcatttgctgtgccccttctgctgatctccagcatcttgatggcgtataccgtggccctggctaactcatatggacgcctcatctctgaactcaaacgccaaatacagacggaggcgcagaataaagtcttcctggcacagcgtgctgtggcgctgagctcggccgacagaactctttgacctctccagcctggcttggggtgacgtcccacttccagccccagacctgctcccagatcctttttgagcttcgtcaacatcatttgggaaatgagcgaactggaaaagactccgctcttttccagccctgggattccctgctgagccccctgacactccagtaaacctctttctagtaccgcgtggtcagcgccctgcccatccagcaccaggact

SEQ ID NO: 1048 - DNA, 386 bp, Bos taurus
  Clone ID: 54-LIB188-008-Q1-E1-F10
acaagcttttttttttttttttttttttttttttttttcgccagacaggggtaatgcttttatattagtttttctgtaacaagaaaaatcagctttgaagtttttatcattttttttccttaaaaaagaattaaaaaaaaaaaggcacccagaactcccctcaggctcaaagaataaaaaagttctctcatcggtgcagctgggcccttcgctcttgctccacccagccccgccacctccgccgagctccagcccaagacatcagcagcctcagaccttccctctggcatcagtggggctcatccagcaaagctgtgtctgggcccggccagggcctgaaggggaatgactgccccagccttggggagcatgaccggtgggccaag

SEQ ID NO: 1049 - DNA, 240 bp, Bos taurus
  Clone ID: 54-LIB188-010-Q1-E1-F10
acaaacaactgaaggtgactaccgatctgtgagagtaagaaaggggaaaatcacttgacaaagggatggaatgtctgtcacctgcaacaagtagctgactcatctgctattaacaggcacctaccctaaattacagggacccgagcacatgaaactggagatgacatgtgcagggcccctgctgattacactcgctccagaaccccttcttcattactacaaattagaggagaacccagt

SEQ ID NO: 1050 - DNA, 413 bp, Bos taurus
  Clone ID: 54-LIB188-012-Q1-E1-F6
gccatgggcccgggatacatactaaaattccattatcttcaggttccacatacacagtcctgggtggctggagagcaggggatgagagaccctcctttggtcagaaatccagcagagttcaggctgaacagggtttggcactaaatctaggtatcctggttgaatgtatttggatcaggcaggcaaaaagggacctcatctaatcccagcccccacccagcgaaactgctggaagagccccaagttagtgacccggagacccctggggaaaaggggatattcttgctgccagtagctccttcacctcacttgaactcccagcctccctggttctattatcactattctctgtcacctagaccatgactaaaccaggagcccttgtcaccaagtcccagtgaccccctcaccac

SEQ ID NO: 1051 - DNA, 298 bp, Bos taurus
  Clone ID: 54-LIB188-017-Q1-E1-F6
ccatggcggcgggatacagaattgatcactcttgatcgggtctaaactaggtctcgaaagacatcactcttccactgcagatttctgcgcaacagtctgcagaccaggtgcttgagtgtattcctccttcactaaagaaaacacatgcataatcctgctcccccaagcgcctctgcctgttgccacacggcaccccttcccatccctaggggtcgcacctgtcaatgtgcagctcaatgcatttacaaagcgacgtccttccggatttaaaagtttacgatccttacaaggctatcca

SEQ ID NO: 1052 - DNA, 345 bp, Bos taurus
  Clone ID: 54-LIB188-018-Q1-E1-F6
gatacttcagcaaaaactggtattactgtatttccatcatcacctgcctcctctgattcattcaaggccagaccgtgaatacactcttcaatgtctgtccttaagttccaccaagggaagattctgagcacacgggtctcatgtgggcctgggaatacatcatatagtcggcagtctgactgaacgacgtatcctgatgcttcaaccagttactgatcttcttcccaagggataccagtgcaccatgtctgaaaggtccatctatattttgcacgcaggaccatttttgtcggtaccttacacatgtccctgatggcacgaagtgtctgtcagatggtcctgtgc

SEQ ID NO: 1053 - DNA, 424 bp, Bos taurus
  Clone ID: 54-LIB188-020-Q1-E1-F10
acgggagagggctgttcccctctcccccagtgcctcgggaggctgagactgggttgtgcgtcttgctctgcctaggtcccacagcaagaggagggctccgtgcaggggtgatccttatcacttgaagtcctctctggccagagtccctcaccttcccacagcccttgctaatgattaccataaaagctgcctccggcctggccttctagcctcagcccagtcaaaagtcccacctttaccatttgatttggtgtgtgcccttagagggaattcagagctccgttaggctcatagaggggcccagaccaaagatatggagggaggggtcccatatcagcaaacacctcaagtttcctgcactgtgactgcatttaagaagcaaagctttgtcaggtctaccagagcagctgataagcctgcagaa

SEQ ID NO: 1054 - DNA, 326 bp, Bos taurus
  Clone ID: 54-LIB188-022-Q1-E1-F10
actaaattttctcgcacagaaatccgtaggggtggaatggggagatgtcaatgctaatgagtataaaacttaatttcaacttcatataaaggaaaaacaaaacgttgagaaaaaacagctttaaattgaataatatctttgaaatcaacagctcaggccagcccttacatatctgacgttaatatacaaccatatttgggatcaaaatgaagatttagggtttacagttacttcaaatccagttttaacagtagccaattcacctcatttccagaaagggaagtctctttaggatgactcgaataatcgtctgaagacacttagat

SEQ ID NO: 1055 - DNA, 283 bp, Bos taurus
  Clone ID: 54-LIB188-023-Q1-E1-F6
accgccccctagtgcccaggactgacaatgaaactgacccccgggacaacaccatctgggaccagaagccacttcaggaggcctatgtgacccaccatcgaccacctccgactggtgggggagctggtgagcatctttggagctgtcatcatcctgttcatagagattagagacattttccgagtggggctcagtcgcgtcttcagacagaccagactccgatgaccattccacgtcctcttcatcacctattcctgcatggtgctggtgaccatggtgatgc

SEQ ID NO: 1056 - DNA, 456 bp, Bos taurus
  Clone ID: 54-LIB188-027-Q1-E1-F6
catactccctaccgccatgggcccgggatacaattggatattactgcttttaaaatgaaaagccgtctaattctgcttttcttggattaactccatgtttagaattggataaatgttactgtttattgaacatcaagctcttccaagcattttgttttccatgattcattttggttttttttccccctcagatatgaagcatcgacaaatgaattgattaatgaagagttaggaatagcctatccaattattgatgggattcctaatatgataccacaggcagctaggatgacacatcaaaataagaagcaagaagaagtggagcagcattagatcatacttaaaaacaacacacacaactaaatattctaaataccacctaccttttaaaaagtcagagtggcgggtattaagtggagaagaatgtttctgtctcttcctatgctgactgtcctg

SEQ ID NO: 1057 - DNA, 65 bp, Bos taurus
  Clone ID: 55-LIB188-009-Q1-E1-F12
ggcggccggacacctacagcagctgcaggcaggatcctggggctaaggctgcagccgctgtaggt

SEQ ID NO: 1058 - DNA, 319 bp, Bos taurus
  unsure (45): Clone ID: 55-LIB188-017-Q1-E1-F12
tttgtccgcacaaacctaagtgccacgctcttgtcagatgctgangggcgtcttctcaaaggaggtcttctacctccacttcaagcaccgtctgagaaccatctctgcacgctgcacggacaggctgtccctcttcttcctggcgagcacctgctcttcttcccggccaacacctgctcttcttcccggccaacacatgctccttgggcaaggcccggcgcagccttgggtcggtgcccttggccgcctctgtcgggaggacagccttctggatgatgagttgctgcagtgggtaaagcagcgtcttcacgggcacact

SEQ ID NO: 1059 - DNA, 250 bp, Bos taurus
  Clone ID: 55-LIB188-017-Q1-E1-F4
aaatgtgttgagaacctagaggttatgcataaggcttatcatttttaacattgctggcctaggagagaaaagattgtattctttaaatggtgattcaggaaatctgatatattcaatacttgtgttacaatagctggtgtgtagaggcaagactatcacccatgactggctgggccctgtaaacacacatgccatgctcccatgctgctctgggatacagaatacaaaatctgacctacggctaaacaac

SEQ ID NO: 1060 - DNA, 406 bp, Bos taurus
  unsure (271): Clone ID: 55-LIB188-018-Q1-E1-F4
agggaaaggccaacaaaacccaagccggtaaaccaagattcggcccaaggtaaccccccaaccaaaactccccttggccttaaccaatttccaattccgggaattcccctcctcctcaagaatggcaactcaatctccaaaaaggaaaattaacaacccaagtaacaagtaaaaaaagggttaattattgcagtttttggcctcctcagtgccctcacactctgctacatgatcatcagagccacagctagcttgaatgctaatgaggtanaatggttttgaagaaagaaaaacactgctttctgactgattgcccttgaaggaaaaaaaacctaattttgtgcatcattttacaatcatgccacacaagcatttatttttagtactacaaaatagtcattgcatg

SEQ ID NO: 1061 - DNA, 381 bp, Bos taurus
  Clone ID: 55-LIB188-019-Q1-E1-F12
accggtacatgggtgccccatgtcggggctgcttgcataagatgcattaaacgccagccaccatcagggtcaggatgcggttcatgagcaccaggaactgagagtccgagaagcgctcgcctggtgacgtggccgtggccccatagctgcgggtcatcactctttcctgcagcactccccacgtcagataagacacctggagccccgaggcacagaacagcagcttcagggcctgccaagtgggactggtctccgctggttctgcccgggcagccaggggaacctcatccggggccttgggctcattgccaaacacacaagttttcaccagggggaagcagagacccctacctgtttccaggtagttcttccgcctgaagt

SEQ ID NO: 1062 - DNA, 447 bp, Bos taurus
  Clone ID: 55-LIB188-019-Q1-E1-F4
cccgaccgccaagggcgcgggatactagaaagaggtttactggagtgtcagggggctcagcagggaatcccagggctggaaaagagcggagtcttttccagttcgctcatttcccaaatgatgttgacgaagctcaaaaaggatctgggagcaggtctggggctggaagtgggacgtcaccccaagccaggctggagaggtcaaagagttctgtcggccgagctcagcgccacagcacgctgtgccaggaagactttattctgcgcctccgtctgtatttggcgtttgagttcagagatgaggcgtccatatgagttagccagggccacggtatacgccatcaagatgctggagatcagcagaaggggcacagcaaaagcctgggtacagccggccagtgccatcctgtatgactactacaaccctgagcacaagtgttccggtgtt

SEQ ID NO: 1063 - DNA, 359 bp, Bos taurus
  Clone ID: 55-LIB188-024-Q1-E1-F4
ccatgagcgccggataccccatctagaccatgatagccgggagatacttctacaagatcttgggggtgcctcgcactgccacaaaagaggatattaacaaggcctacatgacactagccctgcagcttcatcctgacagtcatcctgatgatcaactagcacatcataaattccaacatctgggtgctgcgtacgatgttctatccgctagtgataaaccgctacagtatgatacataacgttaagagggcttgataaatgggcatcagagctcccatggatacattttttcacacatccttggagattttggattcacgtttggaggaatccctcgtcagcaagacagaaatattcca

SEQ ID NO: 1064 - DNA, 308 bp, Bos taurus
  Clone ID: 55-LIB188-025-Q1-E1-F4
tggtgatgaccttgaccccattgggttttaaaaaacccctgcaaccttgtcaggtaaaatgtggaaccattctgaactgttgcattccatcagcttacctcatttcaggtgagccaccaaccataccttggtccccctgaaaaggtcagtcagagactttgggtcaaagttcctacccttctgaacattctttttctcccaaggacattcataactagctacttgaatgtatgatcatgttcacccattccaagcacaaatggagacgccgttggcagggagtattccgactccctttccgtggctgc

SEQ ID NO: 1065 - DNA, 348 bp, Bos taurus
  Clone ID: 56-LIB188-001-Q1-E1-F12
acacagcagagacgcggacaccaccacaccgggccagaagcctggcttcctcgtggaaagtctctggctgccagcacccctgggcagggatatggcctcaagccagctaggggccagggggcagtgcctccgtttgctgaagacaaggggcttcttgctgctgaagctctcggctgccatcttggccgtgcttctcttctgtgaatttctgatctactacctcgttatcttccggtgcagctggtccgagctgaaaacccctgaaggtgccggcacccttggggcccccaaggcccctgagcctgtgctcagggccatgttcttggctgacacccacctgcttggggc

SEQ ID NO: 1066 - DNA, 414 bp, Bos taurus
  Clone ID: 56-LIB188-010-Q1-E1-F12
gccatgggggcgggatactatccggagggatcgtgagcacagacgtagttggttaggtgttgtcctttgctttggagttgcttttcatgtgggattgtggtttcccaaccagcgatggcacccataccccctgcattgaaagtgtggagtcttaacccctggaccaccagcgaagtccctggagttgcattttaatctgtttatttactttttctgttaagtgcatctcttacaactaatatgatattccctttaggtatttacaatagagaactcagcagtttctcatagactgatgaaaaaagtaagtgataattgtcattattgaaatcatgtggggacctgtggggcttgccttcctgagtctgggatcgattgctttgaatcagtgtcagtgccgagggaattggggga

SEQ ID NO: 1067 - DNA, 288 bp, Bos taurus
  Clone ID: 56-LIB188-021-Q1-E1-F8
ggataaaacatacaagatttcaaggaagaagaaaatacgttgtggggagaccaagtgtatgcgttgatgtgtgtattttcttagtcttttttttttttttaacagagaaaaggggattctccttttcctcctttctcagcacgtccaatgaatctactatgtatagaacattcctaacacctcctgagagcaagagccctatttttctgcatgtttgtgaagctcccacccagagcaccagctatcgcttctgctaatacagctgtgagcctcctctccccgcctcca

SEQ ID NO: 1068 - DNA, 420 bp, Bos taurus
  Clone ID: 56-LIB188-026-Q1-E1-F12
gcccgggataacatttaattttttttttttttaaaagacagtgacgttggttttaagggttaaaacccagattttccaggtttcacaattttggtgctagagatccccaaactgcctaactcactggggaaggtttctgaaggtgtgcattatagtaaacagcagcaaaatacccaacaacgttactgctaaaagcagctgctcctgcttgcgcctttagaatactagccgtaaaacagcaaaaacccgcacatctgtgtcagcagttgggatgtgagctactctaaacaacaaacaactgtgaacagtccaaggcagggcctctacaatcatactgggcaagcgctgagctgtggggagaaaatgtcagcacatgcccaagaggagacaatgcacacgtttagtattctaaaggctgct

SEQ ID NO: 1069 - DNA, 422 bp, Bos taurus
  Clone ID: 56-LIB188-027-Q1-E1-F8
acatctgagctttataagcgcctgggaggaacagggaacttggttgagacatttcataacagcatcgctcccttcctagtgcaggaagcttccgctcagaagtcctggcgcctcggcacaggggccacgagctctcctgggctcatagccggtcacagccttggggggattcggcagcggccccagtcacagggcaagccagaccagatttctctgcatctgctctttgacgaactcaagtttggctgtcagagaaatatgcttcatccctgcggttaatttttacacatccttgaaaacatttccaagatcctcagatggtgaagcagatagatggtccttaaggaaggggttgggtcttctctctaacatgagcatttgtgaaaaattcaccgcttcaaccttttaatgctttgaaagcc

SEQ ID NO: 1070 - DNA, 338 bp, Bos taurus
  Clone ID: 56-LIB188-028-Q1-E1-F8
acggtgatggtatttggttactaagtcactgtgctgggtgctttcgccggcttttgctctgctgagtagtgcggggaaagggtccacgtctccaagatttgtctgcacaaacctaagtgccacgctcttgtcagatgctgaggggcgtcttctcaaaggaggtcttctacctccacttcaggcaccgtctgagaaccatctctgcacgctgcacggacaggctgtccctcttcttcctggcgagcacctgctcttcttcccggccaacacaagctccttgggcaaggcccggcgcagccttgggtcggtgcccctttggcgcctctgtcgggaggaca

SEQ ID NO: 1071 - DNA, 108 bp, Bos taurus
  Clone ID: 57-LIB188-004-Q1-E1-G2
aaaggaaccatgattaattaccatcctgtttgtggagaagaaacaatgttcgaccggccgcccgggcaggtacttccctgagacatggatctgggacttggtggttgt

SEQ ID NO: 1072 - DNA, 362 bp, Bos taurus
  Clone ID: 57-LIB188-007-Q1-E1-G10
tcacgaccgctatgggcccgggatacatagatacctccccagacaggtgacagtcattcaccaaggtgctccgacctcagagtggcaactccacgtcagtttcaagcctaaccctccactagccaatgtgggacaaacgtttcaggtagacaacgagttatctgcagagctgcacacaagtcaaagcctctattgtcaggtcgccagtgcctcttagagttgggacactgcagtcagtgcagacccgatactatgaatttcatgctcctaacgtttgatctgcctctccattgtaactcgtataactattaaaagcacttcatcacactaaactgtgtcaatctgacgtctgataaccttta

SEQ ID NO: 1073 - DNA, 414 bp, Bos taurus
  unsure (387): Clone ID: 57-LIB188-009-Q1-E1-G10
ggccgcgggacacttcgagacactgagggggtaagaagcgacaggtgggtgccaaaggggccgcccagccacagtctttccgtgtcgtcctccgagcctgggtggcagaaggcctgggcatagcgccggacacgctgctggttgatatcctgtttctcttccacccgcaggaaccagcggtcccccagcccaaacttgtgcccacagatccccgagcgaggccacaggcaacgtggcagcttcttctctagcatcacagtggtggctacaacctgcgctctccagagctcatcccgctcgtgggctacacgccagtgagtgtcacccatcatagcgatgaggaggttgagcatgagcaaagcagcgatgatggcgaaggcaacgtangtgatgctgtacttcattgtggaagag

SEQ ID NO: 1074 - DNA, 366 bp, Bos taurus
  Clone ID: 57-LIB188-010-Q1-E1-G2
tggccgcgggatacagagagctcaagggagggaagtccagactcagggcccagtcttctccacaggggagaggacacagaagccaaatgagctgtgcgtcatggagcaaagagagagagccctgagctgtgccctggaggccagggcacttggggttcctcctgctggccaggccactggatggcggcctgcctgccccccacagcaggcagtccctgcctggtcagaccctttctgcattcactgttgcacatataaggcagctcaatgtctcctgctaactgggctctatgagctccagctgctggaggacaaggaccaagcatctgattagaatgtgaggtgacagggcttccaccctggggt

SEQ ID NO: 1075 - DNA, 280 bp, Bos taurus
  Clone ID: 57-LIB188-015-Q1-E1-G10
ccgcgggaaacggccaccagacctcgctctgggacacggtactgtgctgtgtgaaaacatgcagcctttaaaggctcaagtactcacttttggcagtgggacatggtatccaaaaagggaactagcactgtgcaactatgtgtagcttgggaaatttcaggggatacagaggcaagcaccgtaaggtcccgcagcgtaacattgcttatggatggcgtacctgagcagcttgtgcaagtcgtgacgtcgaacggacaacacgatcttgcaccaccaatcc

SEQ ID NO: 1076 - DNA, 411 bp, Bos taurus
  unsure (313),(371): unsure at all n locations; Clone ID: 57-LIB188-018-Q1-E1-G2
tttccaacaacaactgcctcctctgattcaatctatgccaacccctgaccaaaaaccccaatgggtgggcttaaaagccatcaagggaagaatctgggcaaaagggcctcaccttggcctgggaagacaacataaaattggcaaacacactgaaagaaggataaagattgtaaaaccagacagacaacttcttcccaaaggaaaacaagcaccaatcctaaagggtccacctaaaaaaagcaaggcggcgccatgtgggtctgaacctgacacatgtccctggtggcaggaggggtctgtcacaaggtcctgngctattgacctctccagaccgtctcctatttccttctgtcttcaaggggctcccctcnctccagtctttcaagttaacccagtggtgcactgattcat

SEQ ID NO: 1077 - DNA, 370 bp, Bos taurus
  Clone ID: 57-LIB188-019-Q1-E1-G10
gcaatgggcgcgggataccccagggtggaagccctgtcacctcacattctaatcagatgcttggtccttgtcctccagcagctggagctcatagagcccagttagcaggagacattgagctgccttatatgtgcaacagtgaatgcagaaagggtctgaccaggcagggactgcctgctgtggggggcaggcaggccgccatccagtggcctggccagcaggaggaaccccaagtgccctggcctccagggcacagctcagggctctctctctttgctccatgacgcacagctcatttggcttctgtgtcctctcccctgtggagaagactgggccctgagtctggacttccctcccttgagctctctgt

SEQ ID NO: 1078 - DNA, 406 bp, Bos taurus
  Clone ID: 57-LIB188-021-Q1-E1-G2
acccactggagctctatcccgccttctttggctattacttcttcaatttcatgatgggagtgctacagctgctgcatatcttctgggcctacctcattttgcgcatggcccacaagttcataactggaaaggtagtagaagatgaacgcagtgaccgggaagaaacagagagctcagagggggaggaggctgcagctgggggaggagtaaagaaccggcccctggccaatggccaccccatcctcaacaacaaccatcgtaagaatgactgaaccattgtccctgctgcccctcagattaacgtataaagccaaggaaataccccaccctcaccacagggtcactttaagctctggggagaaggagaaagcgagaggagcgtgttcttctctgtgccccaacccct

SEQ ID NO: 1079 - DNA, 85 bp, Bos taurus
  Clone ID: 57-LIB188-023-Q1-E1-G2
tattttttttacttttttttttttcattttttttttattttttctattttcttgtgtatatattcatgaattcacatttgtgttg

SEQ ID NO: 1080 - DNA, 298 bp, Bos taurus
  Clone ID: 57-LIB188-025-Q1-E1-G10
cgcaatggccgcgggctacacatgaggagaaatgttccatatagtagatgcaagatacaagggtctcgtatctacagctcatagtgttcatgtccttaatatcctggacggattgatcaggcctgccctgcttcacaagctctgaaactgttgcagtggtcactgcgaatgaccaccactctgcgagcgctccacggcccttgaggaggcgcatgcatggttttctaagtgcatattgacaacggctttttgcacacgttgcattgtctgtctgtgtccaacatgcgacttcacagtt

SEQ ID NO: 1081 - DNA, 154 bp, Bos taurus
  Clone ID: 57-LIB188-027-Q1-E1-G2
tcgaatgcttcacagggtcagtctaccacacacagtctgtgatcaacatcaccaacatcgaggatggtgactcaatcgacagctggcacaatgtgaccaagtgtacgacaccaacttcacagaggacaactagctcctgctccagatccacctg

SEQ ID NO: 1082 - DNA, 73 bp, Bos taurus
  Clone ID: 58-LIB188-001-Q1-E1-G10
acattctgtgtcctggtggccaagataatgatttctgtcctggttggtgtaactcggacctcaactccagagt

SEQ ID NO: 1083 - DNA, 454 bp, Bos taurus
  Clone ID: 58-LIB188-001-Q1-E1-G6
accattttcttttttttttttttaaaagacagtgacgttggttttatggatcaaaaccagaattttcatgtttcacaattttggtgctagagatccccaaactgcctaactcactggggaaggtttctgaaggtgtgcattatagtaaacagcagcaaaatacccaacaacgttactgctaaaagcagctgctcctgcttgcgcctttagaatactagccgtaaaacagcaaaaacccgcacatctgtgtcagcagttgggatgtgagctactctaaacaacaaacaactgtgaacagtccaaggcaggacctctacaatcatactgggcaagcgctgagctgtggggagaaaatgtcagcacatgcccaagaggagacaatgcacacgtttagtattctaaaggctgcttcaggcaggccagcaatgattctgctaagacgaactgctcacat

SEQ ID NO: 1084 - DNA, 304 bp, Bos taurus
  Clone ID: 58-LIB188-004-Q1-E1-G6
gatactgtgtcacacagctgttggaagatttaatagtgaagtatctgcctgatgagctgtctgagagaaaaaaaatatatgatgaagaaactgctgaaccctcacacttgaccaagaatgttccaatatttgtttgcactatggcctatcccactgtgccttgccctcttcatgtatttgagccaagatacagattgatgattcgaagaagtatacagactggaactaaacagtttgggatgtgcgtcagtgatacacagaatagttttgcagactatggttgtatgttacaaattagaaatgt

SEQ ID NO: 1085 - DNA, 403 bp, Bos taurus
  Clone ID: 58-LIB188-008-Q1-E1-G6
acttcgagacactgagggggtaagaagcgacaggtgggtgccaaaggggccgcccagccacagtctttccgtgtcgtcctccgagcctgggtggcagaaggcctgggcatagcgccggacacgctgctggttgatatcctgtttctcttccacccgcaggaaccagcggtcccccagcccaaacttgtgcccacagatccccgagcgaggccacaggcaacgtggcagcttcttctctagcatcacagtggtggctacaacctgcgctctccagagctcatcccgctcgtgggctacacgccagtgagtgtcacccatcatagcgatgaggaggttgagcatgagcaaagcagcgatgatggcgaaggcagcgtaggtgatgctgtaccagagaagcctccct

SEQ ID NO: 1086 - DNA, 406 bp, Bos taurus
  Clone ID: 58-LIB188-013-Q1-E1-G6
acttcatagttttttttttttaattgccttgtttgccttcagtttccttaattttcatggtttacatggatgtgtgtgtaggggctatatttgtgtatatacacgtgggttggggtttttgcatgtgtgggttccatggacgtatgatccccacaagctgtgggagtgattggccaggccttgtttttttaatgtgtgtttttgttttttcgaagaagaggatgctatttagaaaagaaaccgcattgcaaacctcttaccagctcatatgagagagcagattcctgcccttgagcacgctggtaagttgttatcataaatgttttaaaagagttttgagcatttcatgctttaaaagaccttcacagggaatatgacacacaaagttcttttggttttcctttga

SEQ ID NO: 1087 - DNA, 384 bp, Bos taurus
  Clone ID: 58-LIB188-014-Q1-E1-G6
acctactatgtgccatcacaggacccagcactagacgggccaaatacacgtctacaaatctgtccacctcctgctctgagccacgagctgcccgcaggcttgtcttttgacccagttcccgtccctgtgtccagaacacaggccacgccgaccaggagttgtagatggctgaagaagtcttgctacacttcggggagcagtgccccaggtagctaaatcccagaagactcccaggctgagagcgggctagacaaaggtgtttgtcttgacttggaaacagccagatttctctggtggcaccagatcacaacaaagggggcatcttctggtctcccctccccacccccagggggccctgcttaagagggtggtggtcacagggcc

SEQ ID NO: 1088 - DNA, 292 bp, Bos taurus
  Clone ID: 58-LIB188-020-Q1-E1-G10
aaccaggggcctccaagtgaaagctcttcctgctcccactgctccccagccctgtcccaacatggcatatgtgggaaagcggcaggcctgaagcaaacgatgttctggctgtggtaagcagtgtcacagcatccctagtcagtgatcacagagtcacctgggttaaaagtctaggtctcacagtcaaggcaaggattatgaaggtgacacggcaaaggtggtctgaaggtgctcataattttctcaaattcagtggggaagggaaggttggaatgatgtccttcaaggccac

SEQ ID NO: 1089 - DNA, 289 bp, Bos taurus
  Clone ID: 58-LIB188-021-Q1-G6
cgatcatgggcaggcggatcccgcgcccataggtcgcgagcccgagaggctgtcccgggaggaccaagttgtgcaacttggaccacagctgcttcgccgagaggccccaggacctcatcaagttaccctgcctgatcacacgactccgctgctgagttccgctcccgacaaggtgggcaaccaaccgcaacacgccatcgcggttgtgcggattgaggtgcgagttttgcaacacgataaacttcccgtgcaagggcggcggtcctgccagctatgagtactcgccggc

SEQ ID NO: 1090 - DNA, 410 bp, Bos taurus
  Clone ID: 58-LIB188-024-Q1-E1-G6
acctagttcattccagtttgttttttggctccccaagcgtcatctcacgtggagaactttacacctagcctagctggtgccaagagatgtcccaaggacatggccacctgggtccactccagtgacagacccctgacaaagagtaggtctctagaggctgagttgcatggggcctcatcaccccaagccagtgagcctctaatgccactgcgccctgtgggctcccagggcctgagcaatttagctgcagctggcaaaggaggaaggtagtttgagacgggccgctccagaaagtctaaggggtctgtttttttcatttccatggacatcttcaacagcttcaacctgacaacaactgtcctatgaagaaaccagttgtggtttaagcagaggcaacctctctctcctcc

SEQ ID NO: 1091 - DNA, 361 bp, Bos taurus
  Clone ID: 58-LIB188-027-Q1-E1-G10
acatccacgcccagcccctgcacagctgcttgcctagccggcacgccctgcagaactcagattgcacagagctagactcgggcaacgcaagctgtgagctcagtgacaggggacctgtggccttcctgacctgcctcggcctggccgcgggcctggcgcttctcatctactgctgccctccagaccccaaggtgcttccaggggcccggcgtgtcctgggcttctcccctgtcatcattgacaggcacgtcagccgcttcctgctggcctttctcacagatgacctggggggcctctgaccgaccccagccctgcctgcctgcgtgttgctctccaggggcttgcttctttcctaagtgtt

SEQ ID NO: 1092 - DNA, 164 bp, Bos taurus
  Clone ID: 59-LIB188-003-Q1-E1-G12
ggataccttgctaatcgggcacaggcggggggtctgcggctctgttgtgtttattcaccaatttgtacaagctttttttttttatattgttaacattctttggactcatctgactgtttgtcataacaatgctagcataaagaggcatcagcctacattagaat

SEQ ID NO: 1093 - DNA, 126 bp, Bos taurus
  Clone ID: 59-LIB188-007-Q1-E1-G4
gggatcacttatgaacggccagcccaccgggcactttgacaacctggtggtggtcaaaagaaatttcccccaatgaaggatggttggcaaaggagcaattgcaaaccgcaaaaatgcggtggaaac

SEQ ID NO: 1094 - DNA, 457 bp, Bos taurus
  Clone ID: 59-LIB188-010-Q1-E1-G4
atggcggcgggatacgctggtcacagcgccccccaagttgggctcctgtcggtgtcttaggtgagggttccccatcgccccccgccccccacaggggctcaaaagtatcaagggaatggcggccacctgattccccatggagacaggcaaacggattttgactggcggccccagcggtcactggagccctgttccctgtgtcgtccaactatcaaggatgtgcaatgtcacatgtccatccatagcccaggcctgggggtggtgagtatcaaaaggaggaaagaatggtttgtgaagacaggcacgagatatatatatactactatgagtgtgcagttctaaaccacagttgcaggaggacacaggtatgattgtgggggagttcgagcggccgcccgggcaggtcgatgaggaagcctcgggtgcagaaacaacctccggcatccccagactggac

SEQ ID NO: 1095 - DNA, 189 bp, Bos taurus
  Clone ID: 59-LIB188-013-Q1-E1-G12
atacaaaatatcattttactcatacacatctatatacaattaataaacataaggtgaaaccaccttcagcccagataccttctcagtaaatggccgaacgatctcctggctctcacgcatgacagtatcaagcatggcaaggatgacaattgttgaacctttcttacaagctgcccttatacaaggaca

SEQ ID NO: 1096 - DNA, 388 bp, Bos taurus
  unsure (122),(148),(172),(353): unsure at all n locations; Clone ID: 59-LIB188-016-Q1-E1-G4
ccggatactggtgctacctgagagagatgacataggattagagttgcttccctgtttcagtccatgccctcatttgcccactgaacacttgggtttgggacatgaccttcaggtcccttcanggctccaagggctctttgcagtctangggcacagcctgaggctgacctgngccctctcgcatctgcctggtggtcgcaggaagttgcctccacccagaagcaaagatggtcctcggtcccagacagctggacaagggaagtgttgtgggtcagcactggccctcagcactcctggatgggggcagggagggtgggcaaaactttggaaagccaagcagggggtaatcctgngttccaggcaggatcttattcattggatggtcaag

SEQ ID NO: 1097 - DNA, 427 bp, Bos taurus
  unsure (230),(253): unsure at all n locations; Clone ID: 59-LIB188-017-Q1-E1-G12
catggtagccggatactcctagtatttctgggcaaccctgttaatttatttcccaatgaaggccaaagaaaacaaattggcaatcccaaaaccaaaacttaagggaaaaaccttttattacccccccaattatttgttgaaaacaaaaagggcttaaatcccaaaagcaagaaaaatcaccaacttggtgcaaaaaaacttaatgagcaacggcgtgtagaacaagggcngcgaatgggcgtcacgttgatanccatcagcatcttgctgtcgatgtcgggcagccccatgttgccgtacaatatgatagcatttactaccaagataataccaggattctagaagaaaataaaaaggtgatagttcaatcagagatatgaacttccttccagagaagcaatgcttaaactgaatttaagagcaatac

SEQ ID NO: 1098 - DNA, 139 bp, Bos taurus
  Clone ID: 59-LIB188-021-Q1-E1-G4
ggatacctgctgaggcagacgatctagctctagctgcctagtttccggtacaacaattcgagtcttggccactagggatcccttgggcccctcaatgggcggggttcaaggcttgggattcttacagcaagggggcaca

SEQ ID NO: 1099 - DNA, 200 bp, Bos taurus
  Clone ID: 59-LIB188-025-Q1-E1-G4
gtttgcatccccttgattaatggaggatcggtcccaaccgtcgcccagatcccccagcctggtaaccacctaaccaaccttcattagggccagttctttgccccaaagctcccataacacaaggattccatcatccatcccaaggaggtcagccaatccaggttccaggccaacctggaattaacaagtcccagaaaaat

SEQ ID NO: 1100 - DNA, 320 bp, Bos taurus
  Clone ID: 60-LIB188-004-Q1-E1-G12
gggatacatatttactgtaaataagcctgcacaggggagcttctttaaggaatattgccccaaactcattaagagaaaagactttttaaaaaactttggactcatctggatgtttgtcgttacaaggattgcttaaagagtcatcagcctacataggaatccagcaaagctaggccttgctcagcctgaccccgggaggttaattcctatggttcaaggtgctccttctgagtcatcttagtctggacagccttctgggaaggagactaagatctgatggagtttggaggcgcgtgtgccccacagttactggtaaacgg

SEQ ID NO: 1101 - DNA, 423 bp, Bos taurus
  unsure (79),(165): unsure at all n locations; Clone ID: 60-LIB188-004-Q1-E1-G8
gccggatacaaattctgacacctgacacacactcaagtgccacgtctagcgcccactcgcttgtatgctcatgacagtngatggatacaccatcggctcacctcaaccttatttccagcccactgactatgaggggatgatctgccaactcctgaatgtcttgantggaatccctgacgcaccagcaccacgtagcaggttccaggtcagcgacattgaatgccgtcactctgcatctgtcattcgttcgtaggctcaaggttgcgtctcattccaatctgtcctgaagctcactcaggctattgctaggaatgggaaagaagccactgccataccaaccaccgttaatgttgctcatcataacaatcgcctctgcatatcctgcgcccaaatcctcgacaacatggggttaccccccctgtt

SEQ ID NO: 1102 - DNA, 439 bp, Bos taurus
  Clone ID: 60-LIB188-005-Q1-E1-G8
gccatggcggcgggatacctaacatttttcttccactccaaaagcggttctaattgccaacaggctgatctaagctccagaagagtgtctccctctgaagcaatctttctttccccctcacaaggctcccagaagccctagttggccttgacctgacacttcctttttattaggcgtcctgttggggtggctgagaatcatgaaaaacagatcctctgctagcctccatgatgaagttgttagacaccagctttctgggaactcgtgtttgatttttaaatggcatgtgacccttctgtgttctgggaactcaatcagaaaggtaaaagccattaacaaaagttagtaagagttttattcatctcatatcttcctgcctgggttcacggccttactgactgaaataaaatcatttctgattggacgcagacctgcgttt

SEQ ID NO: 1103 - DNA, 431 bp, Bos taurus
  Clone ID: 60-LIB188-007-Q1-E1-G8
gggatacaacggaaagcataataagaataaattttaaagacaaatttttagaaatcttaaaggcagagaaaggaaggaggaggagcagtaaggaagatcaggaaacagggcttcaaggaacacgtggtccacaggatcggagatgtaaggggctcgggggaagagatgggaaccctactaagcttctgtcttatttcagaattcttactcacttcaagggagtgaataggttagaatcaaattacagtgaggtgaagagagaatgacccaaccacccacccgacttgctgaaggaaatgaaggcagccccctctgaccacacttggaaaagcttggctgagaaaagtaggaataaaccgatgactagaggttaactggaagattaagggccattaaagccaagggataaatgcacagttatgcacaggtag

SEQ ID NO: 1104 - DNA, 434 bp, Bos taurus
  unsure (386): Clone ID: 60-LIB188-010-Q1-E1-G8
actatccggggggatcgtgagcacagacgtagttggttaggtgttgtcctttgctttggagttgcttttcatgtgggattgtggtttcccaaccagcgatggcacccataccccctgcattgaaagtgtggagtcttaacccctggaccaccagcgaagtccctggagttgcattttaatctgtttatttactttttctgttaagtgcatctcttacaactaatatgatattccctttaggtatttacaatagagaactcagcagtttctcatagactgatgaaaaaagtaagtgataattgtcattattgaaatcatgtggggacctgtggggcttgccttcctgagtctgggatcgattgctttgaatcagtgtcagtgccganggaattgggggaagtagcagctgccagtaactctactttgtgttttgt

SEQ ID NO: 1105 - DNA, 381 bp, Bos taurus
  Clone ID: 60-LIB188-013-Q1-E1-G8
acttcaggcggaagaactacctggaaacaggtaggggtctctgcttccccctggtgaaaacttgtgtgtttggcaatgagcccaaggccccggatgaggttcccctggctgcccgggcagaaccagcggagaccagtcccacttggcaggccctgaagctgctgttctgtgcctcggggctccaggtgtcttatctgacgtggggagtgctgcaggaaagagtgatgacccgcagctatggggccacggccacgtcaccaggcgagcgcttctcggactctcagttcctggtgctcatgaaccgcatcctggccctgatggtggctggcgtctactgcatcttatgcaagcagccccgacatggggcacccatgtaccggt

SEQ ID NO: 1106 - DNA, 392 bp, Bos taurus
  unsure (327): Clone ID: 60-LIB188-015-Q1-E1-G8
acacagtttatgccctaaataacttgtataaaaatccctgaagtattgtgtgggtgtgtgtgtgagtgtgtgtttgttatatgtctgacaattaaaactttgtcttctggaaattagcgaattctctttttttctccagaagtgtttgttacaagatttgtaaataagagctctacttagtttgtttaccaagaacatgttgcagcaaaccttttacacctaattcccacgaggttgaagtaacgacttttaagatttgccagggtaagcagcagccaggttctcagtcattgttggccttgattcatcttttcaaactcaattttncaagctcaaaaattccagttatccctaattggaatcctttttaggttctagaaccaggaaggggg

SEQ ID NO: 1107 - DNA, 374 bp, Bos taurus
  Clone ID: 60-LIB188-020-Q1-E1-G8
gcgatgggcgcgggatactgcagaagtaccgcagattaacctggatacctaaaactgctaaagtaggaaaagcttctgcttttcacctttgctacgaccttccctcaagcagatagataaacagtggactgtacatgtaccttcaagacatggaaccaaagttttggatttccacatgggagctgatagggacgccagactgttcgatcagccaccagtttgcccagctcaggttgcaccagggacaccgtcctgccccaatagggccacggcctcgcccacatggaaggtgattgaaatagcacgagagtgttgatttcatggctactttgcattaaagcatggatgaatcataactctaattataagttgtc

SEQ ID NO: 1108 - DNA, 391 bp, Bos taurus
  Clone ID: 60-LIB188-022-Q1-E1-G8
actttggagccataggtttccgctgtgagccctataataaccctgcagacttcttcctggacatcattaatggagattcttctgctgtggtgttaaatagagaagacataggtgatgaagctaacgagaccgaagagccttccaaaaaagatactccactcatagaaaaattagctgagttttatgtcaactcctccttcttcaaggaaacaaaagttgaattagataaattctcaggggatcagagaaggaagaagcttccatcctacaaggaggtcacttatgccacctccttctgtcatcagctcaaatggatttccaggcgttcattcaaaaatttactgggtaatccccaggcttctatagctcagctaattgtgacagtcttcct

SEQ ID NO: 1109 - DNA, 407 bp, Bos taurus
  Clone ID: 60-LIB188-026-Q1-E1-G8
acattacttgcctgatggaaggtctgtggttgataccgttggaggaaagcggtttagggttttaaaaagaggaatgaaagatggatattgcaccgcagacattgaatacctggaagatattaaggttgagaatgaagatgaaatagagaacctccggcaacttcatgatttggtctactctcaagcctgcagctggtttcagaatttaagagacagatttcgaagccagattcttcagcactttggatcaatgcctgggcgggaggaaaacctgcaggcaatccctaatggaccggcctggtgttggtggcttcttgctgtccttcctgttgacccccgctatcagctgtcggttttgtcaatgaagtcattgaaagaacggttgacaaagatacagcatatactga

SEQ ID NO: 1110 - DNA, 387 bp, Bos taurus
  Clone ID: 60-LIB188-027-Q1-E1-G12
acccaccacatcattctggctgaaaacctgctgtggggaagaaggtttagaccaagcactttatttcaaccaggtctcaagtttaagtccacaagcatccctggatttctagagataactacctggcctgccgctgcctgccaatgacaagctgggtgcctgtccagatgtttgattggtcttactggtcacatgtatagaagaatgctataccttttcttcttgaacagaaagggaaaggttaatttacactgctgccactcaattcaaatgttttctgagtaatgttctcatggccctcagtcttgaaacttgaaatataaattggtggctgttggaagccagaacatttaactccatcagatgaaaaacaggtctcagcaccag

SEQ ID NO: 1111 - DNA, 374 bp, Bos taurus
  Clone ID: 60-LIB188-027-Q1-E1-G8
gggatacaactgtattatttgtagaaaaccacaagtgtgttcatttatttcttactcccaactaggattaactgtgaagattaatttataaatgtgaacttaagggaaactgaagctctgaaggaagtagtttgaattttgtttttacactcaagttaatcctcaaatggtctaatcgtcactcactaacttggtgacagttcagccctccagacaagacagcgcatgtgtccgccccactggtgtcctggtcaggcctctatggggacaaaggatttgggtctggccagtgtgccgatttcttgtgtgaactctgttctactgatatactgtcgcgtttgacagattttcttcagatgcagcctctgcattgt

SEQ ID NO: 1112 - DNA, 374 bp, Bos taurus
  Clone ID: 61-LIB188-009-Q1-E1-H10
ggccgcgggatactagaaagaggtttactggagtgtcagggggctcagcagggaatcccagggctggaaaagagcggagtcttttccagttcgctcatttcccaaatgatgttgacgaagctcaaaaaggatctgggagcaggtctggggctggaagtgggacgtcaccccaagccaggctggagaggtcaaagagttctgtcggccgagctcagcgccacagcacgctgtgccaggaagactttattctgcgcctccgtctgtatttggcgtttgagttcagagatgaggcgtccatatgagttagccagggccacgatatacgccatcaagatgctggagatcagcagaaggggcacagcaaaagcctgggt

SEQ ID NO: 1113 - DNA, 424 bp, Bos taurus
  Clone ID: 61-LIB188-010-Q1-E1-H2
tggccgcgggctacacgttcacatcaacataggcaaaggtctctctttgccccctttctgctacactgagccttttagcctttgccggcattctgtggcagacagtggggttagtgtatctgttggctttacaggaagcaggagagcatagcgccagctgggtattcaggaagccgcccaggacccagtccagtggccacgaaagcacttcactacaggcccaggtcagtgtttgaggactcatagggttgtaaccaggcgtcactgtcctcctcttcgaggacgtgtttctcaccaactggtaatgggcagatggtgagcggatctgggtgttcgctgccatcgtgggctctaggcctgaaatatgcgcagagcatccccgggaaagtgtcggtgaaggtgaaaatgtgggagccgtccgata

SEQ ID NO: 1114 - DNA, 352 bp, Bos taurus
  unsure (287): Clone ID: 61-LIB188-011-Q1-E1-H10
ccatggaggccggatactgcatataccattgtcgagagggaaagaaacaggctttgaaggctcttgctcgtcaacagcacgtgtgtctgtagttgtatattgtgcatgtatttgtgtagatttaaattttctcccaaaatttcactgacagtgtcagtaacttcaggggctttcaaagcattaaaagtttaagcggtgaaatttttcacaaatgctcatgtttagagagaagaccaaaccccttccttaaaggacatctatctgcttcaccatctgaggatcttggnaatgttttcaaggatgtgtaaaaattaaccgcagggatgaagcatatttctctgacagccaaact

SEQ ID NO: 1115 - DNA, 398 bp, Bos taurus
  unsure (57),(260),(320),(354): unsure at all n locations; Clone ID: 61-LIB188-011-Q1-E1-H2
gccgcgggacacatactaaaattcaattatcttcaggttccacatgcaaagtcctgngtggctggagagcaggggatgagagaccctcctttggtcagaaatccagcagagttcaagctgaacaaggtttggcactaaatctaagtatcccggttgaatgtatttggatcaggcaggcaaaaagggacctcatctaatcccagcccccacccagcgaaactgctggaagagccccaagttagtgacccggagacccctgnggaaaaggggatattcttgctgccagtagctccttcacctcacttgaactcccaccctcnctggttctattatcactattctctgtcccctacnacatgactaaaccaggagcccttgtcaacaagtcctagtgaccc

SEQ ID NO: 1116 - DNA, 192 bp, Bos taurus
  Clone ID: 61-LIB188-015-Q1-E1-H2
gtccgcgccttaacccaaagtaacgccccaaaaggtcccctggctggattctgggcaactgggtccccccgagtttaaaacggggcaacaatttcgttaactcctccctgggcaagaacaaaagcctcgggaacaactaaggctcggtgaggttgataagcacctctggctgcaaaaactgcccaaagatgt

SEQ ID NO: 1117 - DNA, 406 bp, Bos taurus
  Clone ID: 61-LIB188-016-Q1-E1-H2
agcagttacctatcagctcaggcagaggcccggtctcctaacactgctcctgctgggccagtggcacaatttccaagactgtgtttctgtgaagtagtgtaagatacagagttgaccagggaacccagctacacctggcaaagcaggcagaggggtgggggtccacctttaacaatattgccatgtcaacaaatacttttttgagatctactttgtgcaaagtatactaataaactctaaccaattcagttacagatgtattatttctttctctaaaaccttcagtcagggcctatgtctggaaccctaaaagtaatacttttaattcttaagactggctttaaccaaatcaggtgcccaactccttcaaactggggtggacgatagataatgagagactgaattt

SEQ ID NO: 1118 - DNA, 434 bp, Bos taurus
  unsure (352): Clone ID: 61-LIB188-023-Q1-E1-H2
acaataagtccaactaggaggaacagggaacttggttgagacatttcataacagcatcgctcccttcctagtgcaggaagcttccgctcagaagtcctggcgcctcggcacaggggccacgagctctcctgggctcatagccggtcacagccttggggggattcggcagcggccccagtcacagggcaagccagaccagatttctctgcatctgctctttgacgaactcaagtttggctgtcagagaaatatgcttcatccctgcggttaatttttacacatccttgaaaacatttccaagattctcagatggttaagcagatagatggtccttaaggaaggtgttgggtcntctctctaacatgagcatttgtgaaaaattcaccgcttcaacctttaatgccttgaaagcccctgaagttactgacactgtc

SEQ ID NO: 1119 - DNA, 420 bp, Bos taurus
  Clone ID: 61-LIB188-028-Q1-E1-H10
acatgccctagcccaagaccccgtctctagctcatctccccaccacaatcacagcagtcagataaagttgaggagtttattagggaaatatgagaggtaaagacaccccaaatgacagacagaaaactctgaaaatgtcccttttcaagccaagtgggggcctggccttgacctccccaaaaggacaagaaactggtgggttagcaacaacattctctggcagccacctcaccagggcatctcagccaggactgcttcctacccccagccaaaggtgggaataagacaaggactgtttatagaatcaatgcacaggcaatgagagctataaggaaagactgagagagagagagagaggtggggaggaccttgacagagtcccaggtttttggctctcagtgcctcaatgtgttgacatgt

SEQ ID NO: 1120 - DNA, 437 bp, Bos taurus
  Clone ID: 62-LIB188-003-Q1-E1-H6
cggatacaaacagtagtagaaataggaaagcctgcgttttttttttggctcaaattccatcaaacaacaaaatccaaatgcatcaataaaacaaacaatactcaaatggtcttacagttttccactaggttgcattaactttggcttttctcagacaatatttaaaaactattttgtaattctaaacaaaatgatattattaatctacaaacaacaattctcacagcacaaaaaaacacatacatttttttgtatgacattattcaaaaaggtaatgaaactacaggtttttttaaaattttatttcttattaattagcacttaagataattaaaaacatacagtaaaatgaatccagagtagcacaagccaaagaactataacccctatggtgaaagaaagatgaacttgttacgcctttgaggactgccatttga

SEQ ID NO: 1121 - DNA, 452 bp, Bos taurus
  unsure (303): Clone ID: 62-LIB188-005-Q1-E1-H6
cggataacacggaaaactctgggaaatggtttgttcctcagactggaaatgccacaacctgagcttacactcaccgcggtccctggtatgttttctcgtcaccctcatgacttcagagacttcagacttgtggtcctttctctgttactagttctacacacctcacgctacttccttcctcttaagaggaatttcttgaatttcttaggactttctcattttgaaagagtgtagcttcatattgcttattattgggtccttttgtttgctttttaactcgactcacagtctgtcttcccctgnagggcatgcatttcagtattatagaaatgcagtaaacggtaataaattatttacaagcacctagttcgtttaatcttacgtgaaagccatttgcttttggaaaacaaggagaataaatcttttagcaaaacagtggtatctggaagcct

SEQ ID NO: 1122 - DNA, 326 bp, Bos taurus
  Clone ID: 62-LIB188-012-Q1-E1-H6
gccatgggcccgggataccgccccatcaagcccaggactgacaatgaaactgacccccgggacaacaccatctgggagcagaagccacttcaggaggcctatgtgacccaccaggaccacctccgactggtgggggagctggtgagcatctttggagctgtcatcatcctgttcatagagattacagacattttccgagtggggctcagtcgcgtcttcggacagaccatactcggaggaccattccacgtcctcttcatcacctattcctgcatggtgctggtgaccatggtgatgcggctcaccaacaccagcggggaggtggt

SEQ ID NO: 1123 - DNA, 169 bp, Bos taurus
  Clone ID: 62-LIB188-013-Q1-E1-H6
actggagggagttacccttgcttccctccccttctgtgaccccagggtcccagctggctgggtcctcttcctccccccatgtcccttttcctctggccatgttgggagtgagcacctcacattgttgtctgttactgatttttttgataaaaagataataaaacctggt

SEQ ID NO: 1124 - DNA, 230 bp, Bos taurus
  Clone ID: 62-LIB188-023-Q1-E1-H10
gatactacacagaccagtatagcccactggcatctgttgcctgcacagcttgagaactaaactggtttaataagtcacaggctcagcctggttaggatgacctttgtccctctagacaaagggggactgagagggctgatcaggccctggctctggggcttatcctatgcagagaggagaggcctagtggctcaggctggccagaccacatctcctgaccccatgggggt

SEQ ID NO: 1125 - DNA, 141 bp, Bos taurus
  Clone ID: 62-LIB188-026-Q1-E1-H10
gggatacccagcacaccacccctgtggtggctgtagacacttagatggagctccccttctgctggagagtagaggccaggcgtgagggacatcaggattgcaaagatagtctccatagcatagaactggaactgaatgagt

SEQ ID NO: 1126 - DNA, 401 bp, Bos taurus
  Clone ID: 62-LIB188-027-Q1-E1-H10
acatattattctgtaaataagcctgcacaggggagcttctttaaggaatattgccccaaactcattaagagaaaagactttttaaaaaactttggactcatctggatgtttgtcgttacaaggattgcttaaagagtcatcagcctacataggaatccagcaaagctaggccttgctcagcctgaccccgggaggttaattcctatggttcaaggtgctccttctgagtcatcttagtctggacagccttctgggaaggagactaagatctgatggagtttggaggcgcgtgtgccccacagttactggtaacgggaggacaagtaaggtccttggccctagcggttcctcggctcttcctctaggctcatggtttcttagttgcgtgcacaggtgtttgt

SEQ ID NO: 1127 - DNA, 384 bp, Bos taurus
  unsure (224),(344): unsure at all n locations; Clone ID: 63-LIB188-001-Q1-E1-H4
aattagccatccagaccaaaggtcaacttggggaatggcaaacacagagcaagccttctgagaaggggtggtccttttacccttggctgcggcagagactctctttgttgtgtgtcctgagtccatccatgtagcggttgtttcagaccctctgccctcccagtcctcttcctgcctccctgtttgggcagagggctgacgatggagggctcgaaggccagcantgagactggacagccctggaggaagacaggctgataagagggagcatggacttggtccccctggagtgagactctggtcctggggaccctggtcagctgccgcagtggcctcgagcatcncttcaggtcagaccctctgcttggacagtgctctctgtgg

SEQ ID NO: 1128 - DNA, 139 bp, Bos taurus
  Clone ID: 63-LIB188-005-Q1-E1-H4
gcgggatactgaatcaaagttctggcatatacccaacaacctcacagaacacatgcttcctccccaaatgatacattatgccctgcagagcaaaggagacacccctacgatgattcagacacacgtgcaatgatcctgt

SEQ ID NO: 1129 - DNA, 372 bp, Bos taurus
  Clone ID: 63-LIB188-006-Q1-E1-H4
accatctgagtcaaatgtcactaccatgacgggagtgcttcaaaaagccagcctcaattgcccaaagcaaggcccagttgggttggtgtatagatttaaaactgaaagcatcctgattttgagggaattcaggttgtatgatttctcaggcctgagacctctgcaaggcatctctaagccttctcctattcgctccctgactacaaacacaaactcacactactatcctcaaatcccatgaaatctcagctgttggggcagtttctccaccttaattttggggacagactttgcctaatatcaatacagatccagccctttagccctgagactggtggtgtaaaactgatggcaaggtatcaaccacagacc

SEQ ID NO: 1130 - DNA, 383 bp, Bos taurus
  Clone ID: 63-LIB188-008-Q1-E1-H4
gatcaagggtgacatggatagaggacactgggataaaaggcatttcacttttcctatgcagcattttcttttggaaaatcaaggtgaccttcaaccaggacaatgaaagaaggaagaccctctgcatggggagctcagggcggctgtgggggaaagacccgagctgggctcgctcgggttctgcagctgacatcgtctgggggagtcggacgacagctcctgaattgtgcgtttccagttcccatccgtgaaatgcagtgtttagtctttgggtccgagtcgttgttctttggcagatacgaactatttgtgtaccgaagcagtggaggacttcagcgggaggcgctcaagtggaactgcctcccggtcgctttcctacctgt

SEQ ID NO: 1131 - DNA, 366 bp, Bos taurus
  Clone ID: 63-LIB188-009-Q1-E1-H4
tgcataatccattgtcgagagggaaagaaacaggctttgaaggctcttgctcgtcaacagcacgtgtgtcagtagttgtacattgtgcatgtatttgtgtagatttaaattttcgcctaagattttcactgacagtgtcagtaacttcaggggctttcaaagcattaaaggttgaagcggtgaatttttcacaaatgctcatgttatagagaagacccaaccccttccttaatgaccatctagctgcttcaccatctgaggatcttggaaatgttttcatggatgtgtaaaaattaaccgcatggatgaagcatatttctctgacagccaaacttgagttcgtcaaagagcacatgcagaaaatct

SEQ ID NO: 1132 - DNA, 329 bp, Bos taurus
  unsure (248),(290): unsure at all n locations; Clone ID: 63-LIB188-011-Q1-E1-H12
tcccgagccccatggcctcgggatacacagcgagcactagatttagagcatgaatatctgggttctaatatgcaaagccgctttacagcttacaaggctcaggccaagaacttcaaatctgaagcctcagcttctctcgaacttgttaaaactagggctatttaagaccccgtgcaacccaccacacaggtttattgcaagttcaaatcatgacaaataaaaatgctatgactacagcttaagagcantacaggtataaatataacaacagcaatgaatttcaagttgangaatactgaaccacacccttgggtatacccacgtattga

SEQ ID NO: 1133 - DNA, 410 bp, Bos taurus
  unsure (48): Clone ID: 63-LIB188-013-Q1-E1-H4
acatatggcatagctacacgtattgtttgttgttacattgagtcctgngcagaagttttgtcccaaaaattcattatgctgcaaagccgcatagccgtatcgaggaatgctcaagtattgaagccatgacaaccaaggcacgacggttttgagatttaccaacagccctgaaaatatcatcataaacacaaaagagatggtcatgagcagagttgctatagataccacactctgacctgctgctatagccagtgccatggaactagctgaataagccaccatcatcagggtaagcatcatgatgaagaaggcctccacctttggcttcagtcctaacaagaagtatgttatacaagtaaatataatacttggtaacatcctcatggggagtaaatcagattacagttttc

SEQ ID NO: 1134 - DNA, 399 bp, Bos taurus
  Clone ID: 63-LIB188-014-Q1-E1-H4
acaagaaatttacattgtgaaaaatatacaagtgaaaaacgaggccaaaaacctgggtgtggggaggggccacttggtcacaaacacaaataaacatttctgagttcttcctttggtctgactacagccccctctccccaggagagggggtgcagagctgggacctggagatcagaccccagtcccagccctgtcccccaaaataggcagggttggggggcaggcacatctggagcagctggcgctatctggctcgctctggctttgggatggtggggagaacgtggagatgagggagccccttccttttccgagacccctgactgagtgggctgggagcgctgggggtgtgtggggttggcaaagtagcaatggcagtatttggggagtgaatgaaat

SEQ ID NO: 1135 - DNA, 323 bp, Bos taurus
  Clone ID: 63-LIB188-016-Q1-E1-H4
atggaggctggatacgagcccaacgataagggatcccctatttataggaaatgtttacagaaaaaatatagctagagggatcaaactagagttgatgtgaaggccatacatttttatttttccattctcctctttaaaccttccctaacactgcaaccacataaagttgaattttagaactggtagaatttctaagtgtggctcctaactggcagcatcacataggaacataacagaaatgcagtctttcgtatgctgctccacacctgcaacattctaggggtgaggccagccacgttttaacaagccttccagtaacactg

SEQ ID NO: 1136 - DNA, 51 bp, Bos taurus
  Clone ID: 63-LIB188-017-Q1-E1-H4
cggatacaaccccaacaccatgaagggaacccaggcagattccctgaggat

SEQ ID NO: 1137 - DNA, 420 bp, Bos taurus
  Clone ID: 63-LIB188-019-Q1-E1-H12
cgccacgggcgcaggatacaatagtacaggttttacaaattctcaaggagtcaaagttgggccagaccgataactgatggggttaacccaaggcactgattccaagtttgacgaccatcagcaaactggcacctgcaatcaggcctgctggcatgaattttctagagttgtagaatctcatccccatgatgccagccaaggttcaagatgtgactaagaaaagccaaatgttcttcggatcctgagacagctgataggaccccaggccggcgagaccaccgaagaggagcccggcagccagggatggaacactgcctgcttttgcatagccaataatcccgccggaagcaaccagtgctgtatagccaaagccaagccagtgtaaaggcactagcgggccggagtccttcggcattgttc

SEQ ID NO: 1138 - DNA, 354 bp, Bos taurus
  Clone ID: 63-LIB188-021-Q1-E1-H4
tggcaataagttaggccttaataaacattaacaggacaaggggcgtcccgtccaaaagacaattccaatcccaatggggaataaggtaataagccccaataacttcaatcctttggatagaaaactttggaactgtgtaccccaaatttaaaaatatataatactagcaaagtaagattgtagtagtttgatcttgtgcagacaaaagcagccttgggaacctgacacttgtaggatcggggtcagtcagccagcaggtaggtgacacaggtaggacctggagcccggacctaaggcctcttctccactgagctttgccccaaacccctcagtgcttgattcaattcagacagc

SEQ ID NO: 1139 - DNA, 145 bp, Bos taurus
  Clone ID: 63-LIB188-026-Q1-E1-H4
acctcattccggatgctggacggcatccaggacaactacacgttcgcccaacccgggattcagatgaaagtgaagctgttggaagagctggtgagccgcattgatgagcaagtgcaccggcacctgggccagcacgaggtgcggt

SEQ ID NO: 1140 - DNA, 428 bp, Bos taurus
  unsure (398): Clone ID: 64-LIB188-004-Q1-E1-H12
aattccattatcttcaggttccacatgcaaagtcctgggtggctggagagcaggggatgagagaccctcctttggtcagaaatccagcagagttcaggctgaacagggtttggcactaaatctaggtatcctggttgaatgtatttggatcaggcaggcaaaaagggacctcatctaatcccagcccccacccagcgaaactgctggaagagccccaagttagtgacccggagacccctggggaaaaggggatattcttgctgccagtagctccttcacctcacttgaactcccaccctcccaggttctattatcactattctctgtcccctacaccatgactaaaccaggagcccttgtcaccaagtcctagtgaccccctcaccacgggaccacanacacctgtgcacgcaactaagaaaccatga

SEQ ID NO: 1141 - DNA, 433 bp, Bos taurus
  Clone ID: 64-LIB188-010-Q1-E1-H8
gatacaagttccactcggcccgtctgcccagcaaggccccaggttcaaagtgctgggaggtgggcccttcgttccgaccccagcgcacacgcagctccaagctgctgatgtccggagggtggtccccaaggccaggagccacagtattaggaaagtctggaagcccctttccttcccccacccatcctcagagacctggcttggagctgggacagggaggtcacagggaggccccaaaccagccgtttgggtgtgttttgactggtaggtcgtatgctgtcccccgggttgacttgatgttctgaaaccagcctcccactggcagattcacccatgctgaccccgacgtatacaccttctgaccgttagcacagacacactcagaggggtcacacatgcacacatgccgtgtggatgggaactttgcagtcag

SEQ ID NO: 1142 - DNA, 344 bp, Bos taurus
  Clone ID: 64-LIB188-011-Q1-E1-H8
ggataccacacaaaagtgctacaaattgcaaataaatacgtagtgaggagcaaggcatagatcaacaggctctggcagggagagggtataacaaagaggctcccacggcaaaaagattcccacaactgtcttcctcttcaaactcaagtcaattcttcttccatcctttagtctcacacatgctgaagaaaggatcagatcagaggggtgaaccggtggcacggaaggttctggaccctacattgccttttttttttctcagagcaagagttgtgaaaaagttacagtgacctgattaatcaagactaagcccaaattctttcatttgagactggggacaaggc

SEQ ID NO: 1143 - DNA, 413 bp, Bos taurus
  Clone ID: 64-LIB188-019-Q1-E1-H8
tgggcgcgggatacatgggtaccccatgtcggggctgcttgcataagatgcagtagacgccagccaccatcagggccaggatgcggttcatgagcagcaggaactgagagtccgagaagcgctcgcctggtgacgtggccgtggccccatagctgcgggtcatcactctttcctgcagcactccccacgtcagataagacacctggagccccgaggcacagaacagcagcttcagggcctgccatgtgggactggtctccgctggttctgcccgggcagccaggggaacctcatccggggccttgggctcattgccaaacacacaagttttcaccagggggaagcagagacccctacctgtttccaggtagttcttccgcctgaagtacagacacattcagatgcagctgcag

SEQ ID NO: 1144 - DNA, 269 bp, Bos taurus
  Clone ID: 64-LIB188-021-Q1-E1-H8
gggatacatgaagggcagatccacgtcgtagttgggggggccgtcgatgatggtgaggaacagctcaaaggtgctgaacagtgccatggggtaactgtagaaatggcccagctcattggggtcctctgtctggaagatgataaagaaggccgaggcaaagcccaggatgaccacggccatcagccagcagaatctcatcagatcgccaaaaatcatcttctggatcatgatggtgaaggggcccagcatctggaatcctcgcgcaaagt

SEQ ID NO: 1145 - DNA, 406 bp, Bos taurus
  Clone ID: 01-LIB2809-001-Q1-E1-A1
cggatacccatgtatatatagctttatgtttgacccaactctggctcctaaaattctttcttttttgggaggcagctatgctcaccaccataccaccaatgtatctctttttgaagtctcaaaatgctgtagccatcttcttactatgaggggagctgaccaatatccccaagatggcagagtagaaagatgaaagaattttgacaatttcctgagctgctggaatcagcaattctggaaataaccaacctcaagatttcttgttatctagaataagaaatcttcctgttgtgaaagaaagaaaacaattcgtctgcagcagagaccacttttaccacaaactaaatgcttcttctttatcctaagcctaaagtatatcaggacattgagatttgcttttgagttt

SEQ ID NO: 1146 - DNA, 259 bp, Bos taurus
  unsure (81): Clone ID: 01-LIB2809-011-Q1-E1-A9
tacaccctggatccctccagggggctggggccaccttctgattgaggcactttggaacctgcctttgcttcttgtgcttcncagtcaacgctacgcaccccctgcttctgcaagcctcgcactgtccgctgggagcactgactcagggtacgcatcttatccagtaagccgggggcatccagcatgctctctggttctgacccagacatatgagactaaaaacaaatcctcttttgctccatggctgactctggcacaa

SEQ ID NO: 1147 - DNA, 433 bp, Bos taurus
  Clone ID: 01-LIB2809-013-Q1-E1-A9
acaccctggatccctccatggggctggggccaccttctgagtgaggcactttggaacctgcctttgcttcttgtgcttcccagtgaaggctaagcaccccctgcttctgcaagcctcgcactgtccgctgggagcactgactcagggtaggcagcttatccagtaagccgggggcatccagcatgctctctggttctgacccagacagaggagactaaaaacaaatcctcttttgctccatggctggctctggcacaacatgagcattcggcttggccgtgcctcatgagtgcgaatgcctgtgcccaggatgtttctagcaggctttgccagccttgtctggagtcatcaatgtggtaaggagcacaaggatatagatggagactctggaggccaagtgaaagtggcagcttgctcaactttgtaaagagaa

SEQ ID NO: 1148 - DNA, 403 bp, Bos taurus
  unsure (350),(376),(388): unsure at all n locations; Clone ID: 01-LIB2809-018-Q1-E1-A1
acatacttaaactaaaatctaggccaaaatgctctaaaacttcatccactagtctgtaattcagttacacactataagacttattcaaatctaattatgtggtaacaagacctgaaagtattttgtaaaagtttgttttaaaaatccctagataaacgtaatctgctaattttccattctattttctatatttttccttgttttatctgtctcctttgctttgcacaagttcccaaggacaatccctaaaaaaattatgagtcctattgttcggttggaggtgaacttttcccaacagtcctcaagtctgtggatgtccagagtgtaaatctggtgagcaagatgggctnccacagcagccaaggcagtgtagtanggcatagtctgnacactgttcactccc

SEQ ID NO: 1149 - DNA, 203 bp, Bos taurus
  Clone ID: 01-LIB2809-032-Q1-E1-A9
acacttttatttactatgatccagctcaggcttctctcttttacaaaagacctgcttcaaaccaaaagcacctgccccaataaattcaaacccagcccaattcagggaaaatggtttaattttctggaatttgagaaaaatttgggttggcctttttcccttcccggtcctcctcaaaccccttgcaagggttttcgtaaaaa

SEQ ID NO: 1150 - DNA, 254 bp, Bos taurus
  Clone ID: 01-LIB2809-026-Q1-E1-A1
tcgtgggacggcggatcccgcgcccatatgagtactcgccggcggtcgacctgcatgatctgccacacgtggcaagcgcttccatcgatacgttcactattgtatactctgaggtaaataacttcccgctaccgatcctgatacgtccttgctctctcaaattcttatggtctgagaattggagagaagatagcacggccaacgataaactctaaccggtcgcctcggtaactactcacgtaagtgagattaat

SEQ ID NO: 1151 - DNA, 187 bp, Bos taurus
  Clone ID: 02-LIB2809-001-Q1-E1-A9
gggatagagcacaacctcgactgaggcttaggatgtgagatgccatgaactttgctgaacagtgtctctgttcagcaaactaaccagcattccccacaacacagtctagggcagacgatagtatagaggagtgttggaagaaccttgggtccctttgtccctgtaacctcagttgtctaggcagaaa

SEQ ID NO: 1152 - DNA, 433 bp, Bos taurus
  Clone ID: 02-LIB2809-006-Q1-E1-A9
ccctgtcaccctccatcgggctggggccaccttctgagtgaggcactttggaacctgcctttgcttcttgtgcttcccagtgaaggctaggcaccccctgcttctgcaagcctcgcactgtccgctgggagcactgactcagggtaggcagcttatccagtaagccgggggcatccagcatgctctctggttctgacccagacagaggagactaaaaacaaatcctcttttgctccatggctggctctggcacaacatgagcattcggcttggccgtgcctcatgagtgcgaatgcctgtgcccaggatgtttctagcaggctttgccagccttgtctggagtcatcagtgtggtaaggagcacaaggatatagatggagactctggaggccaagtgaaagtggcagcttgctcaactttgttaagagaaaca

SEQ ID NO: 1153 - DNA, 71 bp, Bos taurus
  Clone ID: 02-LIB2809-008-Q1-E1-A5
gatacccatgtatatatagctttatgtttgacccaactctggctcctaaaattctttcttttttgggaagc

SEQ ID NO: 1154 - DNA, 462 bp, Bos taurus
  Clone ID: 02-LIB2809-010-Q1-E1-A5
ccacgggacagcacggaaaactatgggaaatggtttggttcctcaaagactgggaaaatgcccaacaaaccttgaagcctttaaaactccaaccgggggtcccctgggtaaggttttctcccgtaaccctcaaggaatttcaaagaacttcaaacttgtgggccctttcccctgttactagttctaaacacctcacgctacttccctcctcttaagaggaatttcttgaatttcttaggactttctcattttgaaagagtgtagcttcatattgcttattattgggtccttttgtttgctttttaactcgactcacagtctgtcttcccctggagggcatgcatttcagtattatagaaatgcagtaaacggtaataaattatttacaagcacctagttcgtttaatcttacgtgaaagccattcgcttttggaaaacaaggagaataaatcttttagcaaa

SEQ ID NO: 1155 - DNA, 248 bp, Bos taurus
  Clone ID: 02-LIB2809-010-Q1-E1-A9
gggatactccttaggcatggagggcaattgcatctactggctggacgcctagactgaccgtctgagagctttcgcagaggaccagattgtgactttcgaaggcgacttccagatcatgcgggcaaattcggagatcggtaagtgtacaaacaagtagaatattggaacctgaaacccaatcccagctgtgtacagtatccacgctttgatcgctaccggaatcattttacgggaacctgatttttggc

SEQ ID NO: 1156 - DNA, 433 bp, Bos taurus
  Clone ID: 02-LIB2809-011-Q1-E1-A5
gccgggatactcatccatgtgtccgaggccccttccctgatacgctgtgtccaacaggatatgacctgggttcaaaggaagtctgcgacaagcgctgacccacgatatcaaagcatgagttctgctcttcgtcgttttggttcccagacattcatgtgcccttctgtattccccaattcaatctcaaaactggtctgaggtgagaaaggcattcggcagccagaatacctttaaggaacacagtcctgtgaccgtatggatgggaaggacaaatgatggaaggagttacacacgatgcaggctgggggtactagcatcagagatttacactgatgcctctgctctatcgaagccacgggaagctagcagtcacctcagatcttggttttgatatggactcgtgcaacaaatttaacaactatcctgaaaggct

SEQ ID NO: 1157 - DNA, 323 bp, Bos taurus
  Clone ID: 02-LIB2809-015-Q1-E1-A9
atacagggcagactccacatgtgatgtatgcttacattgagttctcagtagagtaatcgtgatgcatagggtttgtcaagtgcatgagcgttatctggtgttacagtataagtccatcaggaatgtatccagcagcatccgggcttggggtcattgtcaggtcagcgatgtctaagtttctattctaggcatattcattgcaatgctgcctataggcatgttccatgtgggagtcatcttgggcgacctatgttatcgcatcggtgagtccacagttattggcggtttgcgttgtggggattcatctgcttcctcgcggaatg

SEQ ID NO: 1158 - DNA, 388 bp, Bos taurus
  Clone ID: 02-LIB2809-030-Q1-E1-A5
acatcaaatatacctcaaaaaagcctgaggaggaggtaaagagttatatcagaaaactcgggagccccaaggcctgggagatgggacagaggaagctctgatttaaaactcacttttcagctcctacaagcaatgcccagaccagctcgcctgccagtctaggggtgttctcccaggctccaaggcttcctgcttctcctccatctctcaaaacctggcttggggcccttggcttgagagtaaccccatgctggggatgtgctaagtcaaaagaaagaaagaaagaaagaaattgagaatcatatttctagaacgagatgtatgaaaaggtcagaatgtggtatcattgtctcatggatcctgaactacagtcctcattcccaatccc

SEQ ID NO: 1159 - DNA, 350 bp, Bos taurus
  Clone ID: 02-LIB2809-026-Q1-E1-A5
agcggtcgatctgcacgatatcccaaacgtgggaagcgcttccatcgatacgttcactattgtatactctgaggtaaatacgttccgctaatgatcctgacacgtctttggtctctcaaattctcatggcgtgagaattggagagaagatagcacggccaacgataaactctaaacggtcccctcggtaatcactcacgtaagtgagattaattcgcttcgcgtgagtccggcgtttggactgcccaaaggtctgctcggacgtccattaatcaatgcccgaagcgcgccccacaccgcctttcgctactcccgcgtgttggcgttggcgcctgagtcagtgcgtcgcgt

SEQ ID NO: 1160 - DNA, 346 bp, Bos taurus
  unsure (327): Clone ID: 03-LIB2809-005-Q1-E1-A3
gatgccacgaactttgctgaacagtgtctccgttcagcaaactaaccagcattccccacaacacagtctagggcagacgatagtatagaggagtgttgggagaaccttgggtccctttgtccctgtaacctcagttgtctaggcagaaacctggctttattctacttaaaggttgaaaatatacaataccaaatgctctgccactgttgaactccaacgatggaaaggaggagaacatttcttccggttataaatggatacatggaggctacagagcttaggctaaactaaaggcatccttgtcatttgagttgttcctctcagtangaaaaacaaaaaatctaat

SEQ ID NO: 1161 - DNA, 389 bp, Bos taurus
  Clone ID: 03-LIB2809-007-Q1-E1-A3
gatggccgatcgcatgtatatataactttatgtttgacccaactctggctcctaaaattctttctttttttgggaggcagctatgctcaccaccataccaccaatgtatctctttttgaagtctcaaaatgctgtagccatcttcttactatgaggggagctgaccaatatccccaagatggcagagtagaaagatgaaagaattttgacaatttcctgagctgctggaatcagcaattctggaaataaccaacctcaagatttcttgttatctagaataagaaatcttcctgttgtgaaagaaagaaaacaattcgtctgcagcagagaacactttttacacaaactaaatgcttcctctttatcctaagcctaaagtatatcaggac

SEQ ID NO: 1162 - DNA, 426 bp, Bos taurus
  Clone ID: 03-LIB2809-008-Q1-E1-A11
gccatgggctcaccatgtatataaagctttatgtttgacccaactctggctcctaaaattctttcttttttgggaggcagctatgctcaccaccataccaccaatgtatctcttttttgaagtctcaaaatgctgtagccatcttcttactatgaggggagctgaccaatatccccaagatggcagagtagaaagatgaaagaattttgacaatttcctgagctgctggaatcagcaattctggaaataaccaacctcaagatttcttgttatctagaataagaaatcttcctgttgtgaaagaaagaaaacaattcgtctgcagcagagaccacttttaccacaaactaaatgcttcttctttatcctaagcctaaagtatatcaggacattgagatttgcttttgagttttaagactgccctgc

SEQ ID NO: 1163 - DNA, 433 bp, Bos taurus
  Clone ID: 03-LIB2809-010-Q1-E1-A3
gggataccaacacaagtgctaacatcactgattgaaaacaggaactgggcttttgaaacatgttctatctttcccttctttagtaaacagaaggtcggtttgatctggcaactcttccttccagcagttccaggtatcagtggcttagagtgtgaacccagtagcaccagagagaagatgctggatcactgccgctgctagtgctctggggtgggtgtgtgtggaggtggggaatgagtgtgaacggactgaactggaaagtttcctgtgggaagagcatggtctctttagagcctgaaaggcagctgcatgaaggagaaggaagagttacgggttaggactaaaggggtctggctatgagtctggctcaactactttgtgaccttgagtgaacaacctctctacggaccttcactcaggtaagttctgagcc

SEQ ID NO: 1164 - DNA, 409 bp, Bos taurus
  Clone ID: 03-LIB2809-012-Q1-E1-A3
accattaattggacaaataaaatgtatccatttaatgcaaaaaaaccttacccgttgtcaaaaggacaactggtccattaaggaaacccaaattaaaaggcaaaggtcagaaaaactacaggaaactttaaactgggtcgtcaaacatagttaaaggataaaaagtaaggcactgtgtttcttaagaactggccctctgaatttcctttctcggcttcagaatgtggaaaagacatacatttaggaactttacgccaaagagttttcaaaggattatgcagcatcgaatatgacttggtagtatttagcatgtttacaaacacattttaaaatatttatatcaagatctatataaaaatgaaactgtgaacagctggacaagaacactgttctacccgccgaacttttt

SEQ ID NO: 1165 - DNA, 365 bp, Bos taurus
  Clone ID: 03-LIB2809-015-Q1-E1-A3
ctgaggcttaggatgtgagatgccatgaactttgctgaacagtgtctctgttcagcaaactaaccagcattccccacaacacagtctagggcagacgatagtatagaggagtgttggaagaaccttgggtccctttgtccctgtaacctcagttgtctaggcagaaacctggctttattctatttaaaggttgaaaatatacaataccaaatgctctgccactgttgagctccaaggatggaaaggaggagaacatttcttcctgtattaattggatagatggaggctacagagcttaggctaaactaaaggcatccttgtcttttgagttgttcctctcagtaggaaaaaaaaaaaatctaatg

SEQ ID NO: 1166 - DNA, 350 bp, Bos taurus
  Clone ID: 03-LIB2809-016-Q1-E1-A11
ttgactaaggcttaggatgtgagatgccatgaactttgctgaacagtgtctctgttcagcaaactaaccagcattccccacaacacagtctagggcagacgatagtatagaggagtgttggaagaaccttgggtccctttgtccctgtaacctcagttgtctaggcagaaacctggctttattcgatttaaaggttgaaaatatacaataccaaatgctctgccactgttgagctccaaggatggaaaggaggagaacatttcttcctgtattaattggatagatggaggctacagagcttaggctaaactaaaggcatccttgtcctttgagttgttcctctcagtagg

SEQ ID NO: 1167 - DNA, 131 bp, Bos taurus
  Clone ID: 03-LIB2809-025-Q1-E1-A3
gccatgggcgcgggataccgcacaaccttgactgaggcttaggatgtgagatgccatgaactttgctgaacagtgtctctgttcagcaaactaaccagcattccccacaacacagtctagggcagacgata

SEQ ID NO: 1168 - DNA, 389 bp, Bos taurus
  unsure (179): Clone ID: 03-LIB2809-027-Q1-E1-A3
cactttactttattatgatccagctcaggcttctctcttttacaaaagacctgcttcaaccaaaagcagctgctcccatacagtccaacgcagcccaattcaggggaaatggtgtaattgtctgggatttggagaagatttggtgtggcctttttcccttctcggtgctcctcatatcncctggcagggttttcgtaagagagcagtcgtgtccctgagctggcaggtggaggatgagtgtgggaattggggaacatttgagggagatggttcatctctgccacaagagccttgggtgcttcttaacccagctaatttaaaaaccaaatcggcatatgttctggctaaagcctagtgctgataaaaatcacccctgctgagtcctctga

SEQ ID NO: 1169 - DNA, 301 bp, Bos taurus
  Clone ID: 03-LIB2809-028-Q1-E1-A3
atggtgtcattgtctgggatttggagaagctttggtgtggcctttttcccttctccgtgctcagatatcccctggcagggttttcgtaagagagcagtcgtgtccctgagctggcaggtggaggatgagtgtgggaattggggaacatttgagggagatggttcatctctgccacaagagccttgggtgcttcttaacccagctaatttaaaaaccaaatcggcatatgttctggctaaagcctagtgctgataaaaatcactcctgctgagtcttctgaagtaagatacgccggttctga

SEQ ID NO: 1170 - DNA, 460 bp, Bos taurus
  Clone ID: 04-LIB2809-007-Q1-E1-A7
taccgcaagaccatgactgaggcttaggatgtgagatgccatgaactttgctgaacagtgtctctgttcagcaaactaaccagcattccccacaacacagtctagggcagactatagtatagaggagtgttggaagaaccttgggtccctttgtccctgtaacctcagttgtctaggcagaaacctggctttattctatttaaaggttgaaaatatacaataccaaatgctctgccactgttgagctccaaggatggaaaggaggagaacatttcttcctgtattaattggatagatggaggctacagagcttaggctaaactaaaggcatccttgtcttttgagttgttcctctcagtaggaaaaaaaaaaatctaatggaagaccactgtagattagatcctctgaccaagcacctaccgcttggaaatgcctgtggggtagttttaattccacaggt

SEQ ID NO: 1171 - DNA, 410 bp, Bos taurus
  Clone ID: 04-LIB2809-010-Q1-E1-A7
catgtaaatatagctttatgtttgacccaactctggctcctaaaattctttcttttttgggaggcagctatgctcaccaccataccaccaatgtatctctttttgaagtctcaaaatgctgtagccatcttcttactatgaggggagctgaccaatatccccaagatggcagagtagaaagatgaaagaattttgacaatttcctgagctgctggaatcagcaattctggaaataaccaacctcaagatttcttgttatctagaacaagaaatcttcctgttgtgaaagacagaaaacaattcgtctgcagcagagaccacttttaccacaaactacatgcttcttccttagcccaaccccacagtatatcaggagattgagatttgtttttgaggttttaagactgccc

SEQ ID NO: 1172 - DNA, 450 bp, Bos taurus
  Clone ID: 04-LIB2809-023-Q1-E1-A11
catgtaccctaccgcgatgggcgcgggataccctgggaccaaggacaccatccagccttgtgtagggtcatggtatagatcagatccacggaacacaattagaatagaaagataagttggttttgatcatcagttgtaaagcatgcatctgatgacctgtggaattaaaactaccccacaggcatttccaagcggtaggtgcttggtcagaggatctaatctacagtgatcttccattagattttttttttttcctactgagaggaacaactcaaaagacaaggatgcctttagtttagcctaagctctgtagcctccatctatccaattaatacaggaagaaatgttctcctcctttccatccttggagctcaacagtggcagagcatttggtattatatattttcaacctttaaatagaataaagccaggtttctggctaaacaactg

SEQ ID NO: 1173 - DNA, 385 bp, Bos taurus
  Clone ID: 04-LIB2809-024-Q1-E1-A7
gggataccacaaaaccttgactgaggcttaggatgtgagatgccatgaactttgctgaacagtgtctctgttcagcatactaaccagcattccccacaacacagtctagggcagacgatggtatagaggagtgttggaagaaccttgggtcgctttgtccctgtaacctcagttgtctaggcataaacctggctttattctatttaaaggttgacaatatacaataccatgtgctctgccactgttgagctccaaggatggaaaggaggagaacatttcttcctgtattaattggatagatggaggctacagagcttaggctaaactaaaggcatccttgtcatttgagttgttcctcccagtaggaaaaaagttaatctaatgg

SEQ ID NO: 1174 - DNA, 187 bp, Bos taurus
  Clone ID: 04-LIB2809-025-Q1-E1-A7
cttacgtggtgggatgtcatgtcctttgcagaagatttttgctgttcagtcaatttgccgccattccccacagccgtgtctatggaagcccatatgtttgagccatgttatccaacgcacgactgttttgggccctaccaacaccgctgactatgtcgtcatgtgcacttaacctatggtcatgttc

SEQ ID NO: 1175 - DNA, 414 bp, Bos taurus
  Clone ID: 04-LIB2809-031-Q1-E1-A7
acagttgacaggagtataaatatagagtataaatggctctgtttgggaatctgtatctacacagggaaggtcaggggaaggctcagtttggtatcccaacctgctaaagtgattgagaagctagaatggggaaggacagggtctgggagcacacggctgcatcgatcccctttcccaggcttagttgaagctcacttactctccagggagaactaggtttgttgagggtaagaagcaagggcaagaagaggtgtaaataataatacaacgggggctctcaaaggcacagagaaggcatctgggccaagaaggagcacacttcttggatccacagacatgcacgcactccactgccacttgatgatcatgcttctgtgggcagtccagccatgccctggtttccaacctccgaaa

SEQ ID NO: 1176 - DNA, 342 bp, Bos taurus
  Clone ID: 04-LIB2809-026-Q1-E1-A7
atatcccacacgtgggaagcgcttccatcgatacgttcactattgtatactctgaggtaaatacgttccgctaatgatcctgacaagcctttggtctctcaaattctcatggcgtgagaattggagagaagatagcacggccaacgataaactctaaacggtcccctcggtaatcactcacgtaagtgagatcacttcgcttcgcgtgagtcgggcgtttggactgcccaaaggtctgctcggacgtcgattaatcaatgcccgaagcgcgccccacaccgcctttcgctactcccgcgtgttggcgctggcgcctgagtcagtgcgtcgcgtgcctgcttg

SEQ ID NO: 1177 - DNA, 469 bp, Bos taurus
  Clone ID: 05-LIB2809-001-Q1-E1-B1
atgcgacgcgatggccgcgggatacacacggagaactctgggaaatggtttgttcctcagactggaaatgccacaacctgagcttacactcaccgcggtccctggtatgttttctcgtcaccctcatgacttcagagacttcagacttgtggtcctttctctgttactagttctacacacctcacgctacttccttcctcttaagaggaatttcttgaatttcttaggactttctcattttgaaagagtgtagcttcatattgcttattattgggtccttttgtttgctttttaactcgactcacagtctgtcttcccctggagggcatgcatttcagtattatagaaatgcagtaaacggtaataaattatttacaagcacctagttcgtttaatcttacgtgaaagccattcgcttttggaaaacaaggagaataaatcctttaacaaaacaatgggaaccgggaag

SEQ ID NO: 1178 - DNA, 376 bp, Bos taurus
  Clone ID: 05-LIB2809-006-Q1-E1-B1
gaaagggcccgggaaatctggaaaaagggttgttcctcagactggaaatgccacaacctgagcttaaactcaacgcggtccctggtaagttttctcgtcaacctcaagacttcaaagacttcaaacttgtgggcctttccccggtactaattctacaaaactcaagccaattccttccccctaagaaggaattcctgaatttcctaagactttcccaatttgaaagaatggagcctcaaaatggctaataatgggtccttttgtttgctttttaactcgactcacagtctgtcttcccctggagggcatgcatttcagtattatagaaatgcagtaaacggtaataaattatttacaagcacctagttcgtttaat

SEQ ID NO: 1179 - DNA, 354 bp, Bos taurus
  Clone ID: 05-LIB2809-007-Q1-E1-B1
ggccggtcgataccgcaaaaccatgactgaggcggacgatcacaagggacaaaaacttagcggttcaatccataacttcagtagactagactgtattccacacaacttagtctaaggaccatcggatcagtaaggggtgtgaaactgggcttgggtcactttgtcgctgtaacctcaattgtcaaggcagaaatctgacttcagtcgtgccaaatgattgaactaactcacagtaattgctttgcactcagggcctgcctttgatggaaaggacgataacatttcttcctgtattaattggatacatggacgctacagagcttaggccatactaatggcatccttgtgttttca

SEQ ID NO: 1180 - DNA, 306 bp, Bos taurus
  Clone ID: 05-LIB2809-007-Q1-E1-B9
ccagtgaaactaacaggtatttttttcatcactgaaaggatcttctttatcactaaattgtatttggcgattcctgcaagttacctgcagatagggccgtgatactgtgttttgagccacagaagggtgtgtgtgtgtgtgtgtgtgtgtgtgtgtgtgtgtctctgtctgtctatcttttctttgcttttttcttttttttctttctttcttttttggagatcctgtaatatcccttttgaggtagcttatttcgtcaattaattagggtgctggatggtagagaattttgtcagtcaactatgt

SEQ ID NO: 1181 - DNA, 342 bp, Bos taurus
  unsure (86),(96),(153): unsure at all n locations; Clone ID: 05-LIB2809-009-Q1-E1-B1
gacacaccctgactccctccagggggctggggccaccttctgagtgaggcactttggaacctgcctttgcttcctgtgcttcccantgaaggctangcaccccctgcttctgcaaccctcgcactgtccgctgggagcactgactcagggtangcagcttatccagtaagccgggggcatccagcatgctctctggttctgacccagacagaggagactaaaaacaaatcctcttttgctccatggctggctctggcacaacatgagcattcggcttggccgtgcctcatgagtgcgaatgcctgtgcccaggatgtttccagcaggctttgccagccttgt

SEQ ID NO: 1182 - DNA, 343 bp, Bos taurus
  Clone ID: 05-LIB2809-011-Q1-E1-B1
gccatgggcgcgggataccctgggcccaaggacaccatccagccttgtgtagggtcatggtatagatcagatccacggaacacaattagaatagaaagataagttggttttgatcatcagttgtaaagcatgcatctgatgacctgtggaattaaaactaccccacaggcatttccaagcggtaagtgcttggtcagaggatctaatctacagtgatcttccactagattatttttttttcctactgagaagaacagctcaaaagacttggatgccttcactttagcccaagctctgtatcctccatctatccactcaacagaggaagaaatgttctcctcct

SEQ ID NO: 1183 - DNA, 286 bp, Bos taurus
  Clone ID: 05-LIB2809-013-Q1-E1-B9
ggggtggccaacgaattagggaaaacgtttttaaaggtccaaaaccaaaatccaaaggaggcataaaggaccaaaaacctcaattcggagggggtcggaatttcaaaaagtccttgctttgtgggtatgctgacaacttatctggatgccttacatcttttctaaacagtgttgcctctgaacgtgctctgctccctccctgctccctctttggagcccctttgcaccccaaagcctgcagaagtggctggtataaaagggggcctggctagagaatgatcagtgt

SEQ ID NO: 1184 - DNA, 434 bp, Bos taurus
  Clone ID: 05-LIB2809-014-Q1-E1-B1
aaggacaccatcaagccttgtgtagggtcatggtatagatcagatccacggaacacaattagaatagaaagataagttggttttgatcatcagttgtaaagcatgcatctgatgacctgtggaattaaaactaccccacaggcatttccaagcggtaggtgcttggtcagaggatctaatctacagtgatcttccattagatttttttttttcctactgagaggaacaactcaaaagacgaggatgcctttagtttagcctaagctctgtagcctccatctatccaattaatacaggaagaaatgttctcctcctttccatccttggagctcaacagtggcagagcatttggtattgtatattttcaacctttaaatagaataaagccaggtttctgcctagacaactgaggttacagggacaaagggacccaa

SEQ ID NO: 1185 - DNA, 251 bp, Bos taurus
  Clone ID: 05-LIB2809-016-Q1-E1-B9
cttgtgtacggtcatggaacatatccaatccacgggagccagtgttcaccaactagtccgttggttttgatgacctgttcatcaagctggatctgagggaccgctcgaactccaaggacaccacacggacttggcaacttgtaggtgactgggaatacgattgaatctcgcgtgatgctccaaaacacatttttcttccctatggatacgaacagtttcctcaatgtggctgccgttgatttaaccatcgg

SEQ ID NO: 1186 - DNA, 442 bp, Bos taurus
  unsure (342): Clone ID: 05-LIB2809-018-Q1-E1-B1
gccatggcaccgggatacgtccataattcagggcaattgtcagtctttgttttagagacggggctggggctgaacaatcccggtggatgaattatttctgggttctcagggtggccttctctgcacatcagccttgaggtccctggctgggcagatggagagccttggctccagttagcatgccaagaaacaagggagtcccagctattccctcccatcccactgtgatttgtaaaaggccaaatgctcttccttcaaatttgtttttgcaaaaaataccaacaatgtcattgcaggtccatctgatgatgacttccattgttcaccgccttcagcattaanaaaaaaaaaaatcaggaaatagtttgcagagaaactacagagaagtttttcatgatgtgctctaaaaattgttaatatatgatttcatctgaatggagtt

SEQ ID NO: 1187 - DNA, 422 bp, Bos taurus
  Clone ID: 05-LIB2809-019-Q1-E1-B1
ccacgggctacaggtactagaaagaggatgtggggagacgactggcaagtgttgctcatagaagactctggaacaacagccagtcagacgtagtgacacttaaatacgagggtcagttctcatctgcacacacctctgcattttttcccctgcttaaacacacacattcatacaggaggacatgctatagtggtgaacatttggttctcaaccttccgaagagcttggaagagtcctctgaattatttcctgaaatactggaattgtctcatggagaaatcttccagtgaagggaagggggagttaaaaatatccttaactatttaacttagattaatatgcctgctgaggcaaaagcaagtcactgctctcctttgtcaaggatcagagaaagtggtggctacaggctctacgttttcact

SEQ ID NO: 1188 - DNA, 384 bp, Bos taurus
  Clone ID: 05-LIB2809-025-Q1-E1-B1
gccatgggcgcgggatacatatggaatagctacacttattgtttgttgttacattgagtcctgggcaaaagttttgtcccaaaaattcattatgctgcaaagccgcatagccgtatctaggaatgctcaagtattgaagccatgacatccagggcactacggttttgagatttaccaacagccctgagaatatcatcataaccacagaacatatggtcatgaccagagttgctatagataccagactctgacctgctgctatagccaatgccatggaactagctgaataacccaccatcatcagggtatgcatcatgatgaacaaggcctccacccttggcttcaatcctaacaagaagtatgttatacaagttaatataagac

SEQ ID NO: 1189 - DNA, 156 bp, Bos taurus
  Clone ID: 05-LIB2809-027-Q1-E1-B9
tgaataataaaggaaatcaaaatggaaaagaacgcgaagagcacaagaatgacggctgcgcactgctcgtcgctgagcgcccgcccggggctcgtgctttccacagtgtctctgctggcgctggctggtggttcagtcctctgagagatgaagagt

SEQ ID NO: 1190 - DNA, 317 bp, Bos taurus
  Clone ID: 05-LIB2809-028-Q1-E1-B1
tccttttttgggaggcagctatgcgcaccacgatagcgcccatgtatcgtctttttgaactctgaccctgcagtagcgctcgtcttagtaggacgggagctagcaatctgcgaagatgcagagtagaaagatgaaagaattttgacaatttcctgagctgctggaatcagcaattctggaaataaccaacctcaagatttcttgttatctagactaagaaatcttcctgttgtgaaagaaagaaaacaattcgtctgcagcagagaccacttttaccacaaactaaatgcctcttctttatcctaagcctaaagtat

SEQ ID NO: 1191 - DNA, 375 bp, Bos taurus
  Clone ID: 05-LIB2809-029-Q1-E1-B1
gctccaaccaccatgggcgcgggataccgcaagaccttgactgaggcttaggatgtgagatgccatgaactttgctgaacagtgtctctgttcagcaaactaaccagcattccccacaacacagtctagggcagacgatagtatagaggagtgttggaagaaccttgggtccctttggccctgtaacctcagttgtctaggcagaaacctggctttattctagttaaaggttgaaaatatacaagaccaaatgctctgccactgttgagctccaaggatgggaaggaggagaacatttcgtcctgtattaattggatagatggaggctacagagcttaggctaaactaaaggcatccttgtcctttgagttgttc

SEQ ID NO: 1192 - DNA, 397 bp, Bos taurus
  Clone ID: 05-LIB2809-026-Q1-E1-B1
atcccgcttccatcatgaggacactccagcagtcgccctttcttgtgcttgacccgatgcatgttcaagaggcgacccatgttccttttttgtcgaatcatgttgctgtcacgagagtgacgcttgcgggatttgtcgacgaccatgtgcacctgcgggtgacccctcccgttgacgtggcggagatagagtgcgaccccccgagtgtcccgctggacgacccacatctgcgtccgcacgatccggaaccactctcgaacgcttcttttctttttctttttttttcgcccccaaccattaatttattcaaatcagtccttaccaaatacattgctaaacaaataataatgacacctgaccaaattatttttatagatattttcagcccttgatcata

SEQ ID NO: 1193 - DNA, 413 bp, Bos taurus
  Clone ID: 06-LIB2809-006-Q1-E1-B5
acccatgtatatatagctttatgtttgacccaactctggctcctaaaattctttcttttttgggaggcagctatgctcaccaccataccaccaatgtatctctttttgaagtctcaaaatgctgtagccatcttcttactatgaggggagctgaccaatatccccaagatggcagagtagaaagatgaaagaattttgacaatttcctgagctgctggaatcagcaattctggaaataaccaacctcaagatttcttgttatctagaataagaaatcttcctgttgtgaaagaaagaaaacaattcgtctgcagcagagaccacttttaccacaaactaaatgcttcttctttatcctaagcctaaagtatatcaggacattgagatttgcttttgagttttaagactgccct

SEQ ID NO: 1194 - DNA, 416 bp, Bos taurus
  Clone ID: 06-LIB2809-008-Q1-E1-B5
tgggaccgggccgggataccacgacatccacttttctttgtatacttgataatcagaaactcggggctggcgtgggtcacggctcggagagccctgtcacttagctcagggccgcgtgccctatgctcctgggaccacgtcatcatcggtttgaccatgcccccctggcagagcctttgactgcttcctctgccctgataagcgcaacccatggattcctgtgtttgttcaagcatctcactgagatgaaccccaaaacgcagtcaggaagaacgttcgttttacacacaagaattgcctggtgtctggaggcaccgccacctgcagtttatgggaagctccgttcagggccagcgtccccatggataatgtgcttcttaacgcctgcaaatctgataggcagacatgcactccgc

SEQ ID NO: 1195 - DNA, 434 bp, Bos taurus
  Clone ID: 06-LIB2809-009-Q1-E1-B5
gggatacccatgtatatatagctttatgtttgacccaactctggctcctaaaattctttcttttttgggaggcagctatgctcaccaccataccaccaatgtatctctttttgaagtctcaaaatgctgtagccatcttcttactatgaggggagctgaccaatatccccaagatggcagagtagaaagatgaaagaattttgacaatttcctgagctgctggaatcagcaattctggaaataaccaacctcaagatttcttgttatctagaataagaaatcttcctgttgtgaaagaaagaaaacaattcgtctgcggcagagaccacttttaccacagagtaaatgcttcgtctttaggcgaagcctaaagtatatcaggacattgagatttgcgtttgagttttaggactgccctgctccacagatatttc

SEQ ID NO: 1196 - DNA, 418 bp, Bos taurus
  unsure (339): Clone ID: 06-LIB2809-009-Q1-E1-B9
gggatacattggagccataggtttccgctgtgagccctataataaccctgcagacttcttcctggacatcattaatggagattcttctgctgtggtgttaaatagagaagacataggtgatgaagctaacgagaccgaagagccttccaaaaaagatactccactcatagaaaaattagctgagttttatgtcaactcctccttcttcaaggaaacaaaagttgaattagataaattctcaggggatcagagaaggaagaagcttccatcctacaaggaggtcacttatgccacctccttctgtcatcagctcaaatggatttccaggcgttcattcanaaatttactgggtaatccccaggcttctatagctcagctaattgtgacagtcttcctgggactggttataggtgccatt

SEQ ID NO: 1197 - DNA, 397 bp, Bos taurus
  Clone ID: 06-LIB2809-013-Q1-E1-B5
accctgggcccaaggacaccatccagccttgtgtagggtcatggtatagatcagatccacggaacacaattagaatagaaagataagttggttttgatcatcagttgtaaagcatgcatctgatgacctgtggaattaaaactaccccacaggcatttccaagcggtaggtgcttggtcagaggatctaatctacagtgatcttccattagattttttttttttcctactgagaggaacaactcaaaagacaaggatgcctttagtttagcctaagctctgtagcctccatctatccaattaatacaggaagaaatgttctcctcctttccatccttggagctcaacagtggcagagcatttggtattgtatattttcaacctttaaatagaataaa

SEQ ID NO: 1198 - DNA, 444 bp, Bos taurus
  Clone ID: 06-LIB2809-018-Q1-E1-B5
cgccatgggcgcgggataccgcaaaaccttgactgaggcttaggatgtgagatgccatgaactttgctgaacagtgtctctgttcagcaaactaaccagcattccccacaacacagtctagggcagacgatagtatagaggagtgttggaagaaccttgggtccctttgtccctgtaacctcagttgtctaggcagaaacctggctttattcgatgtaaaggttgaaaatatacaataccaaatgctctgccactgttgagctccaaggatggaaaggaggagaacatttcttcctgtattaattggatagatggaggctacagagcttatgctaaactaaaggcatccttgtcttttgagttgttcctctcagtatgaaaaaacaaaaatctaatggaagatcactgtagattagattctctgaccaagcacctaccgcttgg

SEQ ID NO: 1199 - DNA, 385 bp, Bos taurus
  Clone ID: 06-LIB2809-020-Q1-E1-B5
acaccctagctccctccagggggctggggccaccttctgagtgaggcactttggaacctgcctttgcttcttgtgcttcccagtgaaggctaggcaccccctgcttctgcaagcctcgcactgtccgctgggagcactgactcagggtaggcagcttatccagtaagccgggggcatccagcatgctctctggttctgacccagacagaggagactaaaaacaaatcctcttttgctccatggctggctctggcacaacatgagcattcggcttggccgtgcctcatgagtgcgaatgcctgtgcccaggatgtgtctagcaggctttgccagccttgtctggagtcatcagtgtggtaaggagcacaaggatatagagggagac

SEQ ID NO: 1200 - DNA, 65 bp, Bos taurus
  Clone ID: 06-LIB2809-026-Q1-E1-B9
tattaaagtaattctcttagagtatttccctctgaaagagagggggcttgaagaagaggaagaat

SEQ ID NO: 1201 - DNA, 431 bp, Bos taurus
  Clone ID: 06-LIB2809-030-Q1-E1-B5
acccatgtatatatagctttatgtttgacccaactctggctcctaaaattctttcttttttgggaggcagctatgctcaccaccataccaccaatgtatctctttttgaagtctcaaaatgctgtagccatcttcttactatgaggggagctgaccaatatccccaagatggcagagtagaaagatgaaagaattttgacaatttcctgagctgctggaatcagcaattctggaaataaccaacctcaagatttcttgttatctagaataagaaatcttcctgttgtgaaagaaagaaaacaattcgtctgcagcagagaccacttttaccacaaactaaatgcttcttctttatcctaagcctaaagtatatcaggacattgaaaattgcctttgaattttaaggactgccctgctccacagatatttcc

SEQ ID NO: 1202 - DNA, 393 bp, Bos taurus
  Clone ID: 06-LIB2809-031-Q1-E1-B5
accctggacccaaggacaccatccagccttgtgtagggtcatggtatagatcagatccacggaacacaattagaatagaaagataagttggttttgatcatcagttgtaaagcatgcatctgatgacctgtggaattaaaactaccccacaggcatttccaagcggtaggtgcttggtcagaggatctaatctacagtgatcttccattagatttttttttttttcctactgagaggaacaactcaaaagacaaggatgcctttagtttagcctaagctctgtagcctccatctatccaattaatacaggaagaaatgttctcctcctttccatccttggagctcaacagtggcagagcatttggtactgtacattttcaaccttcaaataca

SEQ ID NO: 1203 - DNA, 423 bp, Bos taurus
  Clone ID: 06-LIB2809-026-Q1-E1-B5
gatcccgggcccatagagatctatatatacgtttatctttccgggaagtgtccctggtaaaattgtttgttttttcccaccgacgtatcgtgaggaggataggacgaatctatgcgtttttcaactgtgaaaatcgtctacggatgttgtcagtatcaccccacgtcaggaatatggggaacatccgacactacaaacatcaaacaattttcagaatttggtcacgtcgtccaatcgacacttgtccaaataacgaaggtgaacatttgttcttatgtacaataacaaatgttggtcttctcaaacaaacaaaagaattgctgtcgacgacacagcagttttaggagaaagtaactccctgttgtttatggtaacggtaaactatatgaccagattcacatttcgttttcacttttaccagtc

SEQ ID NO: 1204 - DNA, 400 bp, Bos taurus
  Clone ID: 07-LIB2809-002-Q1-E1-B11
tggccgcgggatacaccctgactccctccagggggctggggccaccttctgagtgaggcactttggaacctgcctttgcttcttgtgcttcccagtgaaggctaggcaccccctgcttctgcaagcctcgcactgtccgctgggagcactgactcagggtaggcagcttatccagtaagccgggggcatccagcatgctctctggttctgacccagacagaggagactaaaaacaaatcctcttttgctccatggctggctctggcacaacatgagcattcggcttggccgtgcctcatgagtgcgaatgcctgtgcccaggatgtttctagcaggctttgccagccttgtctggagtcatcagtggtataaggagcacaaggatatagatggagactct

SEQ ID NO: 1205 - DNA, 411 bp, Bos taurus
  Clone ID: 07-LIB2809-005-Q1-E1-B3
cggatactgtcaccacatcctatggaacaagacaggggcccgtgtgtgagggccacacaacagggtaaaggtctcaggtgccagaaagcatccccggggaagggccatgcaagctgacaacaatgggtggaaggcgtgaacaggcgcgcgtccaggcggccccacagagttgtgggtgtctcaccagtaaccaggaaatgagacaaacgcggagtgcatgtctgcctatcagatttgcaggcgttaagaagcacattatccatggggaacgctggccatgaacggagcttcccataaactgcaggtggcggtgcctccagacaccaggcaactcttgtgtgtaaaacgcacgttcttcctgactgcgctctgggcgtcatctcagtgagatgcttgcacacacacaagaat

SEQ ID NO: 1206 - DNA, 412 bp, Bos taurus
  Clone ID: 07-LIB2809-006-Q1-E1-B3
gccatgggagcgggatacggcggaaaattcttgaagttcaattttacctgattttttttttactatatagataccaggtattaggtgtatgatttctaatgcatttagtttgactactgaattatgaaccttcagaattttcacagttaccacttttaattcttacagaagcaagtaatatgtcccaccccccccataattttagtaacacttaaaaagtatattgaaagaatattttagttatggtccatacctcaaaaataaaaataccggtgtattggtcaacattttccctcattatcaaccagtttcagctcacatcagagttatagtttcaaggccagacatactactggtttaaaatgaatgttatgtttttaatgtttcttctctccccaaaaagcagcaatag

SEQ ID NO: 1207 - DNA, 168 bp, Bos taurus
  Clone ID: 07-LIB2809-009-Q1-E1-B3
ttgaaagagtgtagcttcatattgcttattattgggtccttttgtttgctttttaactcgactcacagtctgtcttcccctggagggcatgcatttcagtattagagaaatgcagtaaacgggaataaattatgtacagggagctagttcgtggaagcgtacgtgaaa

SEQ ID NO: 1208 - DNA, 437 bp, Bos taurus
  Clone ID: 07-LIB2809-010-Q1-E1-B3
gcgatgggcgcgggataccctgggaccaaggacaccatccagccttgtgtagggtcatggtatagatcagatccacggaacacaattagaatagaaagataagttggttttgatcatcagttgtaaagcatgcatctgatgacctgtggaattaaaactaccccacaggcatttccaagcggtaggtgcttggtcagaggatctaatctacagtgatcttccattagattttttttttttcctactgagaggaacaactcaaaagacaaggatgcctttagtttagcctaagctctgtagcctccatctatccaattaatacaggaagaaatgttctcctcctttccatccttggagctcaacagtggcagagcatttggtattgtatattttcaacctttaaatagaataaagccaggtttctgcctagacaactg

SEQ ID NO: 1209 - DNA, 404 bp, Bos taurus
  Clone ID: 07-LIB2809-011-Q1-E1-B3
gccatgggcgcgggatacaccctgactccctccagggggctggggccaccttctgagtgaggcactttggaacctgcctttgcttcttgtgcttcccagtgaaggctaggcaccccctgcttctgcaagcctcgcactgtccgctgggagcactgactcagggtaggcagcttatccagtaagccgggggcatccagcatgctctctggttctgacccagacagaggagactaaaaacaaatcctcttttgctccatggctggctctggcacaacatgagcattcggcttggccgtgcctcatgagtgcgaatgcctgtgcccaggatgtttctagcaggctttgccaaccttgtctggagtcatcagtgtggtaaggagcacaaggatataaatggagactct

SEQ ID NO: 1210 - DNA, 419 bp, Bos taurus
  Clone ID: 07-LIB2809-013-Q1-E1-B3
tcaattataccacaaaaaagcctgaggaggaggtaaagagttatatcagaaaactcgggagccccaaggcctgggagatgggacagaggaagctctgatttaaaactcacttttcagctcctacaagcaatgcccagaccagctcgcctgccagtctaggggtgttctcccaggctccaaggcttcctgcttctcctccatctctcaaaacctggcttggggcccttggcttgagagtaaccccatgctggggatgtgctaagtcaaaagaaagaaagaaagaaagaaattgagaatcatatttctagaacgagatgtatgaaaaggtcagaatgtggtatcattgtctcatgaatcctgaactacagtcctcattcccagtcccaatttatagctaaacatgttcaaagatacatatg

SEQ ID NO: 1211 - DNA, 430 bp, Bos taurus
  Clone ID: 07-LIB2809-015-Q1-E1-B3
ctcaagaattttgttttcctctctgataagcagcagcttggtcttaggcccaaatgacaagacgctgttgtggacataccaccattcagcatctcatcagttgacagcacctggctcacctgaagactggggctgatctacgtttctccccgtctgtccacggtgaggccccctgacgtgtgggtggacaggaagaccagtggggactgcagggggacagctgacgctgcccaagcccggggatgtcctgtagcccaggacattcatgagcggtgcccgccgagggacttcagatgccataatacttgtggttttgattcttcgcgaacagaaaactgcagaggggagcttagcgacttatgctgtggccatccaaacaccgagataactcccgtaactcactgccttctgcacaaggcctgatgaatct

SEQ ID NO: 1212 - DNA, 357 bp, Bos taurus
  unsure (17),(23),(171): unsure at all n locations; Clone ID: 07-LIB2809-025-Q1-E1-B11
gcaaaaccttgactgangcttangatgtgagatgccatgaactttgctgaacagtgtctctgttcagcaaactaaccagcattccccacaacacagtctagggcagacaatagtataaaggagtgtttggaaaacttgggtccctttgtccctgtaacctcagttgtctangcagaaacctggctttattctatttaaaggttgaaaatatacaataccaaatgctctgccactgttgagctccaaggatggaaaggaggagaacatttcttcctgtattaattggatagatggaggctacagagcttaagctaaactaaaggcatccttgtcttttgagttgttcctctcagtagg

SEQ ID NO: 1213 - DNA, 99 bp, Bos taurus
  unsure (83): Clone ID: 07-LIB2809-026-Q1-E1-B3
atcccgggcccataaagatctatatatacgtttatctttcagagaagtgtacatggtaaaattgtttgttttttcccatcgangtatcgtgaggaggat

SEQ ID NO: 1214 - DNA, 302 bp, Bos taurus
  Clone ID: 08-LIB2809-011-Q1-E1-B7
gcatgggcccgggatacttgtaaatgtgtaagtgggggttgtcgaacaaggaaggcaaacagtggataacgtgcaagatctaagacctgctgaacctatcaggacacatgcacacaaatgcaaaggtgtcgtcagcactcatagaccatgctgcgttggtatacggacaccttatcgggatgcctcacatcttttcgaaaaagtgttgcatcggaacgtgatctgctcccacggtgatacctccatggaacctcttaccaacgcacaccctgcacaaatgacaggtatgataggggccctgg

SEQ ID NO: 1215 - DNA, 367 bp, Bos taurus
  Clone ID: 08-LIB2809-012-Q1-E1-B7
gccatgggcgcggtatacgactccacagggtgaggactgcgggcatgccttcgtccctgccttgataactacctctgcgttcagcattgagcgagcgagacaggcatcctcgccatgactggagaagaatcacagtggatgctggatactggtagggagtgcaagacatagtcactgacgccccactgtgccctgtacaaatctccccttgacctgatggatgcagtatcgccgtagagtgcgacacagtgtgtgtggactgtcaacctccagctatgaactctgtgagccttcgttgttctggcgatggcttggacgctgacggagaggataccctccattggcaagcaattggcaatcctcgatg

SEQ ID NO: 1216 - DNA, 473 bp, Bos taurus
  Clone ID: 08-LIB2809-017-Q1-E1-B7
gccatgggcccgggatacaccctgactccctccagggggctggggccaccttctgagtgaggcactttggaacctgcctttgcttcttgtgcttcccagtgaaggctaggcaccccctgcttctgcaagcctcgcactgtccgctgggagcactgactcagggtaggcagcttatccagtaagccgggggcatccagcatgctctctggttctgacccagacagaggagactaaaaacaaatcctcttttgctccatggctggctctggcacaacatgagcattcggcttggccgtgcctcatgagtgcgaatgcctgtgcccaggatgtttctagcaggctttgccagccttgtctggagtcatcagtgtggtaaggagcacaaggatatagatggagactctggaggccaagtgaaagtggcagcttgctcaactttgtaaagagaaacagtggttcagtgaccctgaaca

SEQ ID NO: 1217 - DNA, 424 bp, Bos taurus
  Clone ID: 08-LIB2809-018-Q1-E1-B7
acagcctggctccctccagggggctggggccaccttctgagtgaggcactttggaacctgcctttgcttcttgtgcttcccagtgaaggctaggcaccccctgcttctgcaagcctcacactgtccgctgggagcactgactcagggtaggcagcttatccagtcagccgggggcatccagcatgctctctggttctgacccagacagaggagactaaacataaatcctcttttgctccatggctggctctggcacaacatgagcattcggcttggccgtgcctcatgagtgcgaatgcctgtgctcaggatgtttctagcacgctttgccagccttgtctggagtcatcagtgtggtaaggagcacaaggatatacatggagactctggatgccaagtgaaagtggcagcttgctcaactttg

SEQ ID NO: 1218 - DNA, 367 bp, Bos taurus
  Clone ID: 08-LIB2809-021-Q1-E1-B11
acatatgacatagctacacgtattgtttgttgttacattgagtcctgggcagaagttttgtcccaaaaattcattatgctgcaaagccgcatagccgtatcgaggaatgctcaagtattgaagccatgacaaccaaggcacgacggttttgagatttaccaacagccctgaaaatatcatcataaacacaaaagagatggtcatgagcagagttgctatagataccacactctgacctgctgctatagccagtgccatggaactagctgaataagccaccatcatcagggtaagcatcatgatgaagaaggcctccacctttggcttcagtcctaacaagaagtatgttatacaagtaaatataata

SEQ ID NO: 1219 - DNA, 80 bp, Bos taurus
  Clone ID: 08-LIB2809-023-Q1-E1-B11
ctctcttcggttgcgtctcggcttgctggttcgcttcctcgactttttcgcgctcatggctctgcggtttctcgtggtgt

SEQ ID NO: 1220 - DNA, 428 bp, Bos taurus
  Clone ID: 08-LIB2809-024-Q1-E1-B7
cgcgatggccgcgggataccctgagcccaaggacaccatccagccttgtgtagggtcatggtatacatcagatccacggaacacaattagaatagaaagataagttggttttgatcatcagttgtaaagcatgcatctgatgacctgtggaattaaaactaccccacaggcatttccaagcggtacgtgcttggtcagaggatctaatctacagtgatcttccattagatttttttttttcctactgagaggaacaactcaaaagacaaggatgcctttagtttagcctaagctctgtagcctccatctatccaattactacaggaagaaatgttctcctcctttccatccttggagctcaacagtggcagagcatttggtattgtatatgttcaacctttaaatagaataaagccaggtttctgcct

SEQ ID NO: 1221 - DNA, 343 bp, Bos taurus
  Clone ID: 08-LIB2809-029-Q1-E1-B7
acccatgtatatatagctttatgtttgacccaactctggctcctaaaattctttcttttttgggaggcagctatgctcaccaccataccaccaatgtatctctttttgaagtctcaaaatgctgtagccatcttcttactatgaggggagctgaccaatatccccaagatggcagagtagaaagatgaaagaattttgacaatttcctgagctgctggaatcagcaattctggaaatagccaacctcaagatttcttgttatctagaataagaaatcttcctgttgtgaaagaaagaaaacaattcgtctgcagcagagaccacttggtacacaaactaaatg

SEQ ID NO: 1222 - DNA, 408 bp, Bos taurus
  Clone ID: 08-LIB2809-031-Q1-E1-B7
acatatggcatagctacacgtattgtttgttgttacattgagtcctgggcagaagttttgtcccaaaaattcattatgctgcaaagccgcatagccgtatcgaggaatgctcaagtattgaagccatgacaaccaaggcacgacggttttgagatttaccaacagccctgaaaatatcatcataaacacaaaagagatggtcatgagcagagttgctatagataccacactctgacctgctgctatagccagtgccatggaactagctgaataagccaccatcatcagggtaagcatcatgatgaagaaggcctccacctttggcttcagtcctaacaagaagtatgttatacaagtaaatataatacttggtaacatcctcatggggagtaaatcagattacagttt

SEQ ID NO: 1223 - DNA, 379 bp, Bos taurus
  unsure (366): Clone ID: 08-LIB2809-026-Q1-E1-B7
gatcccgcgcccatagacgacaaaccggtcaatcccgatatgtgtgtccccatacccgagtcgtttgtccccaagaccgaccagtttccagtcacaaacccagacgagcccgtcaccaccaaagatcagacttccaccaacaccgtcctcaccgtcctcgatggaacagtccacgacaccgacaccaacctcgacattttgaagatgactcacactgaccgtgtccgtttgactaaacccgtgaagtccatatttacccaacccgatttgtttctcgttaccacggatacggtggttgagtttccccagtgggattagttgaccgtcaaccaaaccgccgaggaggagacccctttcacctaacancacccatcttttc

SEQ ID NO: 1224 - DNA, 423 bp, Bos taurus
  Clone ID: 09-LIB2809-002-Q1-E1-C1
accgcaagaccttgactgaggcttaggatgtgagatgccatgaactttgctgaacagtgtctctgttcagcaaactaaccagcattccccacaacacagtctagggcagacgatagtatagaggagtgttggaagaaccttgggtccctttgtccctgtaacctcagttgtctaggcagaaacctggctttattctatttaaaggttgaaaatatacaataccaaatgctctgccactgttgagctccaaggatggaaaggaggagaacatttcttcctgtattaattggatagatggaggctacagagcttaggctaaactaaaggcatccttgtcttttgagttgttcctctcagtaggaaaaagaaaaaagatctaatggaagatcactgtagattagatcctctgaccaagcacctaac

SEQ ID NO: 1225 - DNA, 414 bp, Bos taurus
  Clone ID: 09-LIB2809-006-Q1-E1-C1
gccatgggtacgggatacttcccactagtgtgcttaaaactctcagctgctatcacaggtcatctatatgatgtagggatctgttccacattgccctgcgatgtaaagggtaaaagctgaacaggctactgcctgaagtaacagcaaagggatgacttcatttaatactgtggtcagctcacacagctaactccagggaactgttctttcagaactatgagaaattcagaattcctcggttgacactttgtccaaggaactattgccccagtgtttctccaaccgacatcataaaatggagtgtgattcagaatcatcagagaagctatttaaagaccctagtccttgagacagagtcagaattaagcctagagtggatccaggcatgagtatgtttcacaggttccataaggg

SEQ ID NO: 1226 - DNA, 366 bp, Bos taurus
  Clone ID: 09-LIB2809-013-Q1-E1-C9
gccaaggccgcgggatacaccctggatccctccagggggctggggccaccttctgagtgaggcactttggaacctgcctttgcttcttgtgcttcccagtgaaggctaggcaccccctgcttctgcaagcctcgcactgtccgctgggagcactgactcagggtaggcagcttatccagtaagccgggggcatccagcatgctctctggttctgacccagacagaggagactaaaaacaaatcctcttttgctccatggctggctctggcacaacatgagcattcggcttggccgtgcctcatgagtgcgaatgcctgtgcccaggatgtttctagcaggctttgccagccttgtctggagtcatc

SEQ ID NO: 1227 - DNA, 377 bp, Bos taurus
  Clone ID: 09-LIB2809-017-Q1-E1-C1
gccaagggcgcgggatcccgcaagaccttgactgaggcttaggatgtgagatgccatgaactttgctgaacagtgtctctgttcagcaaactaaccagcattccccacaacacagtctagggcagacgatagtatagaggagtgttggaagaaccttgggtccctttgtccctgtaacctcagttgtctaggcagaaacctggctttattctatttaaaggttgaaaatatacaataccaaatgctctgccactgttgagctccaaggatggaaaggaggagaacatttcttcctgtattaattggatagatggaggctacagagcttaggctaaactaaaggcatccttgtcttttgagttgttcctctcagtagg

SEQ ID NO: 1228 - DNA, 446 bp, Bos taurus
  Clone ID: 09-LIB2809-022-Q1-E1-C1
gccaagggcgcgggatacacttttatttattatgatccagctcaggcttctctcttttacaaaagacctgcttcaaccaagagcagctgctcccatacagtccaacgcagcccaattcaggggaaatggtgtaattgtctgggatttggagaagatttggtgtggcctttttcccttctcggtgctccttatatcccctggcagggttttcgtaagagagcagtcgtgtccctgagctggcaggtggaggatgagtgtgggaattggggaacatttgagggagatggttcatctctgccacaagagccttgggtgcttcttaacccagctaatttaaaaaccaaatcggcatatgttctggctaaagcctagtgctgataaaaatcacccctgctgagtcttctgaagtaagatacgccggttctgagtctcctccactcctgccc

SEQ ID NO: 1229 - DNA, 385 bp, Bos taurus
  Clone ID: 09-LIB2809-025-Q1-E1-C9
gactgtggttctcctagagtatttccctctgaaagagagggggcttgaagaagaggaagaattagccaggttgcctcctttcctctcgctgctggacaggagatggagaggttgaggggcagggtctgtacgcagttcctaagagatagggttacaaaagaaaggctctgagatcacattgctgggggattcacaaggttactgagtaagttgttgggtgtcctgatatagaagctggttatacaaacaagttagatgttgggttcatttcattaattccactttctccttggattgagaaagcattagaaggcttctccccacggtgttgaaccctttcactcattccttctattaccttctagcgggaaatacatgactggct

SEQ ID NO: 1230 - DNA, 323 bp, Bos taurus
  Clone ID: 09-LIB2809-029-Q1-E1-C1
acacacggagaactctgggaaatggtttgttcctcagactggaaatgccacaacctgagcttacactcaccgcggtccctggtatgttttctcgtcaccctcatgacttcagagacttcagacttgtgggcctttctctgttactagttcgagacaccgcaggctacgtccttcctcttaagaggaatttcttgaatttcgtaggactttctcactttggaagagtgtagcgtcatattgcgtattattgggtccctttgtttgctttttaactcgactcacagtctgtcttcccctggagggcatgcatttcagtattatag

SEQ ID NO: 1231 - DNA, 320 bp, Bos taurus
  Clone ID: 09-LIB2809-031-Q1-E1-C1
cgcagccctccagccgccaagggcccgggatacttcatactccaacttgcacctcccatccacagctttggctccaaccgcatcacaagtaggactgagctctggatccggagaggctatcaagcagctagaaagctttttatattcactccacaaataaatacagaaggccaacctgcccagtacaaatgattcagtccatctctgtgactgtttcggatgaaaatgctaataggaactgcccctctccaaattccaaatctctcatttttaaagaccaagaatgtgaaagaaatgaaatgtggaaagacttgtcaggt

SEQ ID NO: 1232 - DNA, 212 bp, Bos taurus
  Clone ID: 09-LIB2809-026-Q1-E1-C1
cggggggtcacattctatctccaccacgtcaagggaaggggtcacccggaggtgcacatggtcctcgaccaatcccacaagcctcactctcgtcacaacaacatgattcgacaaaaaaggaacatgggtcgcctcttgagcatgcatcggttccatcacaagaaactggttctcgtccagaggcagtagaaaaactacgagtactcgccggc

SEQ ID NO: 1233 - DNA, 429 bp, Bos taurus
  Clone ID: 10-LIB2809-001-Q1-E1-C9
acaccctgactccctccagggggctggggccaccttctgagtgaggcactttggaacctgcctttgcttcttgtgcttcccagtgaaggctaggcaccccctgcttctgcaagcctcgcactgtccgctgggagcactgactcagggtaggcagcttatccagtaagccgggggcatccagcatgctctctggttctgacccagacagaggagactaaaaacaaatcctcttttgctccatggctggctctggcacaacatgagcattcggcttggccgtgcctcatgagtgcgaatgcctgtgcccaggatgtttctagcaggctttgccagccttgtctggagtcatcagtgtggtaaggagcacaaggatatagatggagactctggaggccaagtgaaagtggcagcttgctcaactttgtaaag

SEQ ID NO: 1234 - DNA, 408 bp, Bos taurus
  Clone ID: 10-LIB2809-006-Q1-E1-C5
acccatgaatatatagctttgtgtttgacccaactctggctcctaaaattctttcttttttgggaggcagctatgctcaccaccataccaccaatgtatctctttttgaagtctcaaaatgctgtagccatcttcttactatgaggggagctgaccaatatccccaagatggcagagtagaaagatgaaagaattttgacaatttcctgagctgctggaatcagcaattctggaaataaccaacctcaagatttcttgttatctagaataagaaatcttcctgttgtgaaagaaagaaaacaattcgtctgcagcagagaccacttttaccacaaactaaatgcttcttctttatcctaagcctaaagtatatcaggacattgagatttgcttttgagttttaggact

SEQ ID NO: 1235 - DNA, 339 bp, Bos taurus
  Clone ID: 10-LIB2809-009-Q1-E1-C5
accaaaaaatgaatcagtatcaatttttttaagtaagagtgtagagcagtgatgttttcctcagcatatgatcctgttatacttgaaactgaagagaaacttcatatcctatgcctttatttgtttagatcttataattcatcaagtgggtttttaatgtttttaactttcacattaagtctcaaaaatcatatttaaatttttagtgatattttcatgaacactccatcttttcctcaagtcattacttcaagttttagaataaaatccttctaggtaaaagaactgctatgattagagaactggatttcggccattttcaatccacaggcatagcac

SEQ ID NO: 1236 - DNA, 418 bp, Bos taurus
  Clone ID: 10-LIB2809-009-Q1-E1-C9
acattttatttttctgtatcagcaggtccatagtaaagttctcaagttgccaagttgatgataactttgcattcaacagaccatcatcagaaagttgaccctacccaggaaagtaatcacttcttttcaaatcatgggaaattccaatctgtaatttactttaggtctcaattaattgggttctttaaaaattcaatgagaaacttcatgaaaaagtcagccaatacatacacctaaacataatttttacagttttaagatgctagataggaacaggatttatttagtattagacattattgctcaatcatatacagaatagattctgtatctctaagtgcataaaatgtaaggttaaaaaaatagattactggaagccttaagcaaacaaaatattttctgatcatcactttcacaa

SEQ ID NO: 1237 - DNA, 434 bp, Bos taurus
  Clone ID: 10-LIB2809-010-Q1-E1-C5
gcaatgggcgcgggataccgcaagaccttgactgaggcttaggatgtgagatgccatgaactttgctgaacagtgtctctgttcagcaaactaaccagcattccccacaacacagtctagggcagacgatagtatagaggagtgttggaagaaccttgggtccctttgtccctgtaacctcagttgtctaggcagaaacctggctttattctatttaaaggttgaaaatatacaataccaaatgctctgccactgttgagctccaaggatggaaaggaggagaacatttcttcctgtattaattggatagatggaggctacagagcttaggctaaactaaaggcatccttgtcttttgagttgttcctctcagtaggaaaaaaaaaaaatctaatggaagatcactgtagattagatcctctgaccaagcacct

SEQ ID NO: 1238 - DNA, 358 bp, Bos taurus
  Clone ID: 10-LIB2809-010-Q1-E1-C9
cgggataacccgcgaccatggatcctatcaagccttgtgtagggtcatggtatagatcagatccacggaacacaattagaatagaaagataagttggttttgattatcagttgtaaagcatgcatctgatgacctgtggaattaaaactaccccacaggcatttccaagcggtaggtgcttggtcagaggatctaatctacagtgatcttccattagatttttttttttcctactgagaggaacaactcaaaagacaaggatgcctttagtttagcctaagctctgtagcctccatctatccaattaatacaggaagaaatgttctcctcctttccatccttggagctcaacagtggc

SEQ ID NO: 1239 - DNA, 76 bp, Bos taurus
  Clone ID: 10-LIB2809-012-Q1-E1-C5
acaccttgaacacggcggccagcaacatgactctgctcgacgcccagggtgccctcctgagaatctcagtggtcga

SEQ ID NO: 1240 - DNA, 420 bp, Bos taurus
  Clone ID: 10-LIB2809-014-Q1-E1-C9
accctgggcccaaggacaccatccagccttgtgtagggtcatggtatagatcagatccacggaacacaattagaatagaaagataagttggttttgatcatcagttgtaaagcatgcatctgatgacctgtggaattaaaactaccccacaggcatttccaagcggtaggtgcttggtcagaggatctaatctacagtgatcttccattagatttttttttttcctactgagaggaacaactcaaaagacaaggatgcctttagtttagcctaagctctgtagcctccatctatccaattaatacaggaagaaatgttctcctcctttccatccttggagctcaacagtggcagagcatttggtattgtatattttcaacctttaaatagaataaagccaggtttctgcctagacaactg

SEQ ID NO: 1241 - DNA, 361 bp, Bos taurus
  unsure (274): Clone ID: 10-LIB2809-018-Q1-E1-C9
catgctcgctaccgccatgggcccaggataccctggacccaaggacaccatccagccttgtgtagggtcatggtatagatcagatccacggaacacaattagaatagaaagataagttggttttgatcatcagttgtaaagcatgcatctgatgacctgtggaattaaaactaccccacaggcatttccaagcggtaggtgcttggtcagaggatctaatctacagtgatcttccattagatttttttttttcctactgagaggaacaactcanaagacaaggatgcctttagtttagcctaagctctgtagcctccatctatccaattaatacaggaagaaatgttctcctcctttccat

SEQ ID NO: 1242 - DNA, 422 bp, Bos taurus
  Clone ID: 10-LIB2809-019-Q1-E1-C5
aaccatcaggtaggaaaacaaagggagagactcatagtttaattgcctattacagagccgtcaggaaattcctggctctgtaaaggtttaatgtcttgctcacagacagaatcggtgaattatgattttattgtgttgacagcttgagccatggaaacagtagtggtttggaaactgatgcaaacgtctgtggattaaccctttgcacatctgatgctccctaccctggagaagagggggaacaaattcagcaagaattaagaatgtgcctaattttaagtgtgttagcccagatagatggccatgggggttttgctgagcggctaaaaagatattctggttaagaaagtttactatgctaaatccaattaagtttcagcttgatggcttagctcctttaccagttaagaaactttactatg

SEQ ID NO: 1243 - DNA, 287 bp, Bos taurus
  Clone ID: 10-LIB2809-023-Q1-E1-C9
gggatacagcataaacgccagctcgtctctaaccctcgggcgatgtggcaacactttctatgtaacgagcaagccctaggggtgaaagaaggacactctggacttttgacgcttgctcaaagtccctgaaagaggatttagaggatgattcatcgatgactattgcagaaagccattgcaagcactgatgaacctaatcaatgcaactcaagcacaggtgatcagtttcagactcaggtgcatcatcaggcaaaggaatatctctatgataaagtccacatactttg

SEQ ID NO: 1244 - DNA, 437 bp, Bos taurus
  Clone ID: 10-LIB2809-028-Q1-E1-C9
ccatgggcccgggataacctggacccaaggacaccatccagccttgtgtagggtcatggtatagatcagatccacggaacacaattagaatagaaagataagttggttttgatcatcagttgtaaagcatgcatctgatgacctgtggaattaaaactaccccacaggcatttccaagcggtaggtgcttggtcagaggatctaatctacagtgatcttccattagatttttttttttttcctactgagaggaacaactcaaaagacaaggatgcctttagtttagcctaagctctgtagcctccatctatccaattaatacaggaagaaatgttctcctcctttccatccttggagctcaacagtggcagagcatttggtattgtatattttcaacctttaaatagaataaagccacgtttctgcctagacaactg

SEQ ID NO: 1245 - DNA, 404 bp, Bos taurus
  Clone ID: 10-LIB2809-031-Q1-E1-C5
acacacggagaactctgggaaatggtttgttcctcagactggaaatgccacaacctgagcttacactcaccgcggtccctggtatgttttctcgtcaccctcatgacttcagagacttcagacttgtggtcctttctctgttactagttctacacacctcacgctacttccttcctcttaagaggaatttcttgaatttcttaggactttctcattttgaaagagtgtagcttcatattgcttattactgggtccttttgtttgctttttaactcgactcacagtctgtcttcccctggagggcatgcatttcagtattatagaaatgcagtaaacggtaataaattatttacaagcacctagttcgtttaatcttacgtgaaagccattcgcttttggaaaac

SEQ ID NO: 1246 - DNA, 322 bp, Bos taurus
  Clone ID: 10-LIB2809-026-Q1-E1-C5
cataaagtcccaggaaccagaggatggacggttctctaccctgatcctatacatgacatggagccaagagacttataatataaacataacttccctttcatcacgacttccaaacgatcgatgtcatcaggtctccaattcaaagtaggggagaccgatttggaacgcctacctcgttcctgacaccctgtaatgtagcctcatgttggattacatttttttttgctggcagtcacacccagacccgaaaacacaaccatcggtttactttacggcaacgcctctacggtggacctatggaattaatagaccaacacatctt

SEQ ID NO: 1247 - DNA, 419 bp, Bos taurus
  Clone ID: 11-LIB2809-003-Q1-E1-C11
tgctcgccgaagccatggccagggcgatacagatcgcataactacacgtattgtttgttgttacattgagtcctgggcagaagttttgtcccaaaaattcattatgctgcaaagccgcatagccgtatcgaggaatgctcaagtattgaagccatgacaaccaaggcacgacggttttgagatttaccaacagccctgaaaatatcatcataaacacaaaagagatggtcatgagcagagttgctatagataccacactctgacctgctgctatagccagtgccatggaactagctgaataagccaccatcatcagggtaagcatcatgatgaagaaggcctccacctttggcttcagtcctaacaagaagtatgttatacaagtaaatataatacttggtaacatcctcatggggagt

SEQ ID NO: 1248 - DNA, 382 bp, Bos taurus
  Clone ID: 11-LIB2809-004-Q1-E1-C3
ccatgaccgcccgatacaccctggcaccctccagggggctggggccaccttctgagtgaggcactttggaacctgcctttacttcttgtgcttcccagtgaaggctaggcaccccctgcttctgcaagcctcgcactgtccgctgggagcactgactcagggtaggcagcttatccagtaagccgggggcatccagcatgctctctggttctgacccagacagaggagactaaaaacaaatcctcttttgctccatggctggctctggcacaacatgagcattcggcttagccgtgcctcagtagtgcgaatgcctgtgcccaggatgtttctagcatggtttgccagccttgtctggagtcatcagtgtggtaaggagcac

SEQ ID NO: 1249 - DNA, 456 bp, Bos taurus
  Clone ID: 11-LIB2809-005-Q1-E1-C11
atacccatgtataaatagctttatgtttgacccaactctggctcctaaaattctttcttttttgggaggcagctatgctcaccaccataccaccaatgtatctctttttgaagtctcaaaatgctgtagccatcttcttactatgaggggagctgaccaatatccccaagatggcagagtagaaagatgaaagaattttgacaatttcctgagctgctggaatcagcaattctggaaataaccaacctcaagatttcttgttatctagaataagaaatcttcctgttgtgaaagaaagaaaacaattcgtctgcagcagagaccacttttaccacaaactaaatgcttcttctttatcctaagcctaaagtatatcaggacattgagatttgcttttgagttttaggactgccctgctccacagatatttcccagagtcaggagagaaagggagca

SEQ ID NO: 1250 - DNA, 424 bp, Bos taurus
  unsure (39),(86)...(87): unsure at all n locations; Clone ID: 11-LIB2809-005-Q1-E1-C3
ccatggtaaccggatacggccgacatgactgaaagctangatgtgagatgccattaaacttgccgaacagtgtccctgttcagcannactaacagcattctccacaacacagtctagggcagacgatagtatagaggagtgttggaagaaccttgggtccctttgtccctgtaacctcagttgtctaggcagaaacctggctttattctatttaaaggttgaaaatatacaataccaaatggctctgccactgttgagctccaaggatggaaaggaggagaacatttcttcctgtattatttggatagatggaggctacagagcttaggctaaactaaaggcatccttgtcttttgagttgttcctctcagtaggaaaaaaaaaaaatctaatggaagatcactgtagattagatcctctgacc

SEQ ID NO: 1251 - DNA, 61 bp, Bos taurus
  Clone ID: 11-LIB2809-007-Q1-E1-C3
attttcaccctttttttttccttcttttctatccttcttctttcatcttcccttatacctt

SEQ ID NO: 1252 - DNA, 314 bp, Bos taurus
  Clone ID: 11-LIB2809-008-Q1-E1-C11
tgggcccggcatcaggcatacgcaatcatgaggcacggccaagccgaatgctcatgttgtgccagagccagccatggagcaaaagaggatttgtttttagtctcctctgtctgggtcagaaccagagagcatgctggatgcccccggcttactggataagctgcctaccctgagtcagtgctcccagcggacagtgcgaggcttgcagaagcagggggtgcctagccttcactgggaagcacaagaagcaaaggcaggttccaaagtgcctcactcagaaggtggccccagccccctggagggagccagggtgt

SEQ ID NO: 1253 - DNA, 349 bp, Bos taurus
  Clone ID: 11-LIB2809-019-Q1-E1-C3
actaagggaagaggtgagatcctcacattcactctcaaaattgccccttgacaaatcagatagctggagcccgttcactcaagagcgggaccccttcacagcgttgtaaaaggaatggtgggcagagggaaagtggcaggggagctacttgcttctcacatacccctggtggcaagtatcacagccctcatccgggcaaaaactatcacagctaaagccatggctctccagcttccttcatcaatgacaatacatgtaatacagcagctttctgctgaagagctggtggagtcacaaagtaaaatgtttatgaaaaggggccagatacccaggcagcaagggaatgttg

SEQ ID NO: 1254 - DNA, 344 bp, Bos taurus
  Clone ID: 11-LIB2809-020-Q1-E1-C3
tttgaatggaaaattaaagtaattctcttagagtatttccctctgaaagagagggggcttgaagaagaggaagaattagccaggttgcctcctttcctctcgctgctggacaggagatggagaggttgaggggcagggtctgtaggcagttcctaagagatagggttacaaaagaaaggctctgagatcacattgctgggggattcagaaggttactgagtaagttgttgggtgtcctgatatacaagctggttatacaaacaagttagatgttgggttcatgtcattaagtccactttctccttggattgagaaagcattaggaggcttctccccacggtgtt

SEQ ID NO: 1255 - DNA, 89 bp, Bos taurus
  unsure (19): Clone ID: 11-LIB2809-023-Q1-E1-C3
gtcttgtttgcattttttnttctcttttttctctccctttccctcttcctgttttctttcctgtgtttctgttgtgcttcttcttcttt

SEQ ID NO: 1256 - DNA, 404 bp, Bos taurus
  Clone ID: 11-LIB2809-024-Q1-E1-C11
gccataggcccgggataccctggacccaaagacaccatccagccttgtgtagggtcatggtatagatcagatccacggaacacaattagaatagaaagataagttggttttgatcatcagttgtaaagcatgcatctgatgacctgtggaattaaaactaccccacaggcatttccaagcggtaggtgcttggtcagaggatctaatctacagtgatcttccattagatttttttttttcctactgagaggaacaactcaaaagacaaggatgcctttagtttagcctaagctctgtagcctccatctatccaattaatacaggaagaaatgttctcctcctttccatccttggagctcaacagtggcagagcatttggtattgtatattttcaacctttaaat

SEQ ID NO: 1257 - DNA, 288 bp, Bos taurus
  Clone ID: 11-LIB2809-025-Q1-E1-C11
ggataccaataacaccaactttatattggtccgttcctcggactggttttgcgcgacctgagcttacactcgccgcagtccctgttatgtcttctcgtcaccctcatgacttcagttacttcagacttgtggtcatgtctctgttactagttctgcacacctcgcgctagttcgttcctcttttcaggaatttcgtgagtttcttacgagtttctcattttgagctagtgtgccttcatatggcttatcattgggtccttttgtgtgccttttatctctactcacagt

SEQ ID NO: 1258 - DNA, 147 bp, Bos taurus
  Clone ID: 11-LIB2809-028-Q1-E1-C3
agatgcacgaattttgacaatttcctgagctgctggaatcagcaattctggaaataatcaacctcaagatttcttgttatctagaataagaaatcttcctgttgtgaaagaaagaaaacaattcgtctgcagcagagaccactttta

SEQ ID NO: 1259 - DNA, 352 bp, Bos taurus
  unsure (8): Clone ID: 11-LIB2809-029-Q1-E1-C3
tacatcantaaaacctcatgaaagcctgaggaggacgtaaagagttatatcagggaactcgggagccccaatgccttggagatgggacagaggaagctctgatttaaaactcacttttcagctcctacaggcaatgcccagaccagctcggctgccagtctagggggtgtcgccgcagctccagagcttcctgcttctcgtccagctctgaaaacctgggtcggggcccttggcttgagagtaccccatgctgcggaggtgctaagtcaaaagaaacagggagagaccgagattgacaatcagatttctagaacgagatgtttgaaaaggtcacaatgtggtatcattgtcc

SEQ ID NO: 1260 - DNA, 402 bp, Bos taurus
  Clone ID: 11-LIB2809-030-Q1-E1-C11
acccatgtatatatagctttatgtttgacccaactctggctcctaaaattctttcttttttgggaggcagctatgctcaccaccataccaccaatgtatctctttttgaagtctcaaaatgctgtagccatcttcttactatgaggggagctgaccaatatccccaggatggcagagtagaaagatgaaagaattttgacaatttcctgagctgctggaatcagcaattctggaaataaccaacctcaagatttcttgttatctagaataagaaatcttcctgttgtgaaagaaagaaaacaattcgtctgcagcagagaccacttttaccacaaactaaatgcttcttctttatcctaagcctaaagtatatcaggacattgagatttgcttttgagtttt

SEQ ID NO: 1261 - DNA, 414 bp, Bos taurus
  Clone ID: 11-LIB2809-031-Q1-E1-C3
cgcaggcctccagccgccaagggcgcgggataccgcaagaccttgactgaggcttaggatgtgagatgccatgaactttgctgaacagtgtctctgttcagcaaactaaccagcattccccacaacacagtctagggcagacgatagtatagaggagtgttggaagaaccttgggtccctttgtccctgtaacctcagttgtctaggcagaaacctggctttattctatttaaaggttgaaaatatacaataccaaatgctctgccactgttgagctccaaggatggaaagggggagaacatttcttcctgtattaattggatagatggaggctacagagcttaggctaaactaaaggcatccttgtcttttgagttgttcctctcagtaggaaaaaaaaaaaatctaatggaa

SEQ ID NO: 1262 - DNA, 356 bp, Bos taurus
  unsure (283): Clone ID: 11-LIB2809-026-Q1-E1-C3
cggattgatcgaggggtccacattactggttagatctggattctgagtagacccgggatccgtgagacagcatttacgttgaacccgctatgagtactcgccggcggtcgacctgcagcatatcccacacgtggcaagcgcttccatcgatacgttcactattgtatagtctgaggtaaatacgttccgctaatgatcgtgatacgtctttggtctctcaaattcttatggcgtgagaattggagagaagatagcacggccaacgataaactctaaacggtcncctcggtaatcactcacgtaagtgagattaattcgcttcgcgtgagtcgggcgtttggactgcccaaaggtct

SEQ ID NO: 1263 - DNA, 149 bp, Bos taurus
  Clone ID: 12-LIB2809-001-Q1-E1-C7
tgctcacggtaaccatggccgccggatatcagtactaaatggaccagacttgcaaccctctaggagactcctaaatccatatcttacacacattctctactctctcaatgctactatatatgttggtctaatgatggacaaacatggtc

SEQ ID NO: 1264 - DNA, 499 bp, Bos taurus
  unsure (7): Clone ID: 12-LIB2809-003-Q1-E1-C7
atgcacncggaagccatggccgggcgcgatacccatgtatatatagctttatgtttgacccaactctggctcctaaaattctttcttttttgggaggcagctatgctcaccaccataccaccaatgtatctctttttgaagtctcaaaatgctgtagccatcttcttactatgaggggagctgaccaatatccccaagatggcagagtagaaagatgaaagaattttgacaatttcctgagctgctggaatcagcaattctggaaataaccaacctcaagatttcttgttatctagaataagaaatcttcctgttgtgaaagaaagaaaacaattcgtctgcagcagagaccacttttaccacaaactaaatgcttcttctttatcctaagcctaaagtatatcaggacattgagatttgcttttgagttttaggactgccctgctccacagatatttcccagagtcaggagagaaagggagcatactgggtgatgggc

SEQ ID NO: 1265 - DNA, 375 bp, Bos taurus
  Clone ID: 12-LIB2809-006-Q1-E1-C11
acgaaaatgcattcggtgagttggttcccttccttcagtatcttttcattatagatattggccattgaagaaataaaacactggactataataagaacatggcccaagccaagacggatgtgactgaaaactctggccgtcgtgttccactgagcttcagaaaatgtccactcctttgctgtgcaattgtctttcctgggacactcacttctgaagagaagacaggaattggatgggctgaagagggcgtcatgatgaaatccatgtcctgccaggctatgctgtgaggtctccgtcccagaagtgagggccacaatagacaaaaacagaatcaggagggaagcccactgtatcccgtttagatgcctcttcagt

SEQ ID NO: 1266 - DNA, 402 bp, Bos taurus
  Clone ID: 12-LIB2809-011-Q1-E1-C7
acaaaatgactataagggtgagtttcagtggtcagcttctgcgcatagttgcacgcacgacgtcggtcgcttatggccagaacctcgttccagacattgtcgcgagacattgtcccatagccccagtcatagtgaactttggttcatctgccctctcgccacgtctgcaaagcttcagacttttcagagggtacaatccagggcatggccggactgcccacagaagcatgatcatcaagtggcagtggagtgcgtgcatgtcggtggatccacgaagtgtgctccatcttggcccagatgccttctctgtgcctttgagagcgcccgttgtattaatggttacacctcttcttgcccatgcttcgtacgcacgagataccgagttctccctggagagtaagt

SEQ ID NO: 1267 - DNA, 389 bp, Bos taurus
  Clone ID: 12-LIB2809-013-Q1-E1-C7
acccatgtaaatatagctttatgtttgacccaactctggctcctaaaattctttcttttttgggaggcagctatgctcaccaccataccaccaatgtatctctttttgaagtctcaaaatgctgtagccatcttcttactatgaggggagctgaccaatatccccaagatggcagagtagaaagatgaaagaattttgacaatttcctgagctgctggacaggagatggagaggttgaggggcagggtctgtaggcagttcctaagagatagggttacaaaagaaaggctctgagatcacattgctgggggattcagaaggttactgagtaagttgttgggtgtcctgatatagaagctggttatacaaacaagttagatgttgggttc

SEQ ID NO: 1268 - DNA, 451 bp, Bos taurus
  Clone ID: 12-LIB2809-014-Q1-E1-C11
gccatgggggcgggatacaccctggctccctccagggggctggggccaccttctgagtgaggcactttggaacctgcctttgcttcttgtgcttcccagtgaaggctaggcaccccctgcttctgcaagcctcgcactgtccgctgggagcactgactcagggtaggcagcttatccagtaagccgggggcatccagcatgctctctggttctgacccagacagaggagactaaaaacaaatcctcttttgctccatggctggctctggcacaacatgagcattcggcttggccgtgcctcatgagtgcgaatgcctgtgcccaggatgtttctagcaggctttgccagccttgtctggagtcatcagtgtggtaaggagcacaaggatatagatggagactctggaggccaagtgaaagtggcagcttgctcaactttgtaaagagaaac

SEQ ID NO: 1269 - DNA, 211 bp, Bos taurus
  Clone ID: 12-LIB2809-015-Q1-E1-C11
tacgcgtcagctctgattgaagcttaggatgtccaatgaaaatagctttgactaatggtatcgctgttgagcacaagcttcatctgtaccgacatgacaatctatggggagtatatggattataggattgttatcttagggttgagtggcataatctctttaacgtcagttctcaaggcaaaggcatgttgctgttcaagtttgacgttga

SEQ ID NO: 1270 - DNA, 378 bp, Bos taurus
  Clone ID: 12-LIB2809-016-Q1-E1-C7
gggatacaatgactatatagctttatgtttgacccaactctggctcctaaaattctttcttttttgggaggcagctatgctcaccaccataccaccaatgtatctctttttgaagtctcaaaatgctgtacccatcttcttactatgaggggagctgaccattatccccaagatggcagagtagaaagatgaaagaattttgacaatttcctgagctgctggaatcagcaattctggaaataaccaacctcaagatttcttgttatctataataagaaatcttcctgttgtgaaacaaagaaaacagttcttctgcaccagataccacttttaccacaatctaaatgcttcatccttatcctaagcctaaagtatatc

SEQ ID NO: 1271 - DNA, 445 bp, Bos taurus
  Clone ID: 12-LIB2809-023-Q1-E1-C11
gggataccgaaagaccttgactgaggcttaggatgtgagatgccatgaactttgctgaacagtgtctctgttcagcaaactaaccagcattccccacaacacagtctagggcagacgatagtatagaggagtgttggaagaaccttgggtccctttgtccctgtaacctcagttgtctaggcagaaacctggctttattctatttaaaggttgaaaatatacaataccaaatgctctgccactgttgagctccaaggatggaaaggaggagaacatttcttcctgtattaattggatagatggaggctacagagcttaggctaaactaaaggcatccttgtcttttgagttgttcctctcagtaggaaaaaaaaaaaatctaatggaagatcactgtagattagattctctgaccaagcacctaccgcttggaaatgcctgtggg

SEQ ID NO: 1272 - DNA, 394 bp, Bos taurus
  Clone ID: 12-LIB2809-026-Q1-E1-C11
acacacgaagaactctgggaaatggtttgttcctcagactggaaatgccacaacctgagcttacactcaccgcggtccctggtatgttttctcgtcaccctcatgacttcagagacttcagacttgtggtcctttctctgttactagttctacacacctcgcgctacttccttcctcttaagaggaatttcttgaatttcttaggactttctcattttgaaagagtgtagcttcatattgcttattattgggtccttttgtttgctttttaactcgactcacagtctgtcttcccctggagggcatgcatttcagtattatagaaatgcagtaaacggtaataaattatttacaagcacctagttcgtttaatcttacgtgaaagccatttgct

SEQ ID NO: 1273 - DNA, 397 bp, Bos taurus
  Clone ID: 12-LIB2809-027-Q1-E1-C7
gggatacactgatcgaacatcacttccctagtgaagagttgcagaaccacaatgcccagtgtcatcggtgctgctcagagaaaaaggatccaattctgctatttagaggctcatctggtggtcccactccaaaggctccgaagttttcacatcggttactgtggcagctcacaaagcaaaaaaaaaaaaaaaaagtgattagtttgtagttcacatagtaggagggggtcagatgtgataagataaacagacagattttaaatcgttaaagtcaaattccatagtaaagtttcttaactggtaaaggagctaagccatcaagctgatacataattggatttagcatagtaaactttcttaaccagaatatctttttagccgctcagcaaaaccccca

SEQ ID NO: 1274 - DNA, 393 bp, Bos taurus
  Clone ID: 12-LIB2809-029-Q1-E1-C11
actttggagccataggtttccgctgtgagccctataataaccctgcagacttcttcctggacatcattaatggagattcttctgctgtggtgttaaatagagaagacataggtgatgaagctaacgagaccgaagagccttccaaaaagatactccactcatagaaaaattagctgagttttatgtcaactcctccttcttcaaggaaacaaaagttgaattagataaattctcaggggatcagagaaggaagaagcttccatcctacaaggaggtcacttatgccacctccttctgtcatcagctcaaatggatttccaggcgttcattcaaaaatttactgggtaatccccaggcttctatagctcagctaattgtgacagtcttcctggg

SEQ ID NO: 1275 - DNA, 362 bp, Bos taurus
  Clone ID: 12-LIB2809-029-Q1-E1-C7
accctgggaccaaggacaccatccagccttgtgtagggtcatggtatagatcagatccacggaacacaattagaatagaaagataagttggttttgatcatcagttgtaaagcatgcatctgatgacctgtggaattaaaactaccccacaggcatttccaagcggtaggtgcttggtcagaggatctaatctacagtgatcttcgattagatttgtgttttcccactgagaggaagaactcaaaagacaaggatgcctttagtttaacctaagcgcggtagcctccatctatccaattaatacaggaagaaatgttctcctcctttccatccttggagctcaacagtggcagggcatttgg

SEQ ID NO: 1276 - DNA, 417 bp, Bos taurus
  Clone ID: 12-LIB2809-032-Q1-E1-C7
acagttgcaggagtataaatatagagtataaatggctctgtttgggaatctgtatctacacagggaaggtcaggggaaggctcagtttggtatcccaacctgctaaagtgattgagaagctagaatggggaaggacagggtctgggagcactgccgcatcgatcccctttcccaggcttagttgaagctcacttactctccagggagaactaggtttgttgagggtaagaagcaatggcaagaagaggtgtaaataataatacaacgggggctctcaaaggcacagagaaggcatctgggccaagaaggagcacacttcttggatccacagacatgcacgcactccactgccacttgatgatcatgcttctgtgggcagtccagccatgccctggtttctaccctctgaaaagtttg

SEQ ID NO: 1277 - DNA, 414 bp, Bos taurus
  Clone ID: 12-LIB2809-026-Q1-E1-C7
gatcccgcgcccatatgagtacacgccggcggtcgacctgcacgatatcccacacgtgggaagcgcttccatcgatacgttcactattgtatactctgaggtaaatacgttccgctaatgatcctgatacgtctttggtctctcaaattctcatggcgtgagaattggagagaagatagcacgccccacgataaactctaaacggtcccctcggtaatcactcacgtaagtgagattaattcgcttcgcgtgagtcgggcgtttggactgcccaaaggtctgctcggacgtcgattaatcaatgccggaagcgcgtcccacaccgcctttcgctattcccgcgtgttggcgttggtgcgcgagtcagtgcgtcgcgtgcctgcttgccgtcgtcgcacgcctatgacgtgagtg

SEQ ID NO: 1278 - DNA, 410 bp, Bos taurus
  Clone ID: 13-LIB2809-001-Q1-E1-D1
ggccgccggataccgcaagacattgactgaggcttaggatgtgagatgccatgaactttgctgaacagtgtctctgttcagcaaactaaccagcattccccacaacacagtctagggcagacgatagtatagaggagtgttggaagaaccttgggtccctttgtccctgtaacctcagttgtctaggcagaaacctggctttattctatttaaaggttgaaaatatacaataccaaatgctctgccactgttgagctccaaggatggaaaggaggagaacatttcttcctgtattaattggatagatggaggctacagagcttaggctaaactaaaggcatccttgtcttttgagttgttcctctcagtaggaaaaaaaaaaaatctaatggaagatcactgtagattag

SEQ ID NO: 1279 - DNA, 387 bp, Bos taurus
  Clone ID: 13-LIB2809-003-Q1-E1-D1
tgtatatatagctatatgtttgacccaactctggctccaaaaattcttttttttttggaaggcagctatgctcaccaccataccaccaaggtacccctttttgaattcccaaaagccggtaccaacctcctaacaagaagggaacctaacaattacccccaaaatggcaaattaaaagaataaagaaattttgccaattccctaaccggcggaaaccaccaatcctggaaataaccaacctcaaaattcctggtaaccaagaataagaaacctccctgttttaaagaaaggaaaccaatccttctgcaccaaaaacaacttttaccacaaactaaatgcttcttcttaacccaaacccaaaattataccaggacattaaaatttcct

SEQ ID NO: 1280 - DNA, 404 bp, Bos taurus
  Clone ID: 13-LIB2809-006-Q1-E1-D1
gccatgggtacgggatacgttggatggaatattaaagtaattctcttagagtatttccctctgaaagagagggggcttgaagaagaggaagaattagccaggttgcctcctttcctctcgctgctggacaggagatggagaggtttaggggcagggtctgtaggcagttcctaagagatagggttacaaaagaaaggctctgagatcacattgctgggggattcagaaggttactgagtaagttgttgggtgtcctgatatagaagctggttatacaaacaagttagatgttgggttcatttcattaattccactttctccttggattgagaaagcattagaaggcttctccccacggtgttgaaccctttcactcattccttctattaccttctagcggaaaa

SEQ ID NO: 1281 - DNA, 348 bp, Bos taurus
  Clone ID: 13-LIB2809-009-Q1-E1-D1
atggcggcgggataccgcaagaccttgactgaggcttaggatgtgagatgccatgaactttgctgaacagtgtctctgttcagcaaactaaccagcattccccacaacacagtctagggcagacgatagtatagaggagtgttggaagaaccttgggtccctttgtccctgtaacctcagttgtctaggcagaaacctgactttattctatttaaaggttgaaaatatacaataccaaatgctctgccactgttgagctccaaggatggaaaggaggagaacatttcttcctgtattaattggatagatggaggctacagagcttagggtaaactaaaggcatccttg

SEQ ID NO: 1282 - DNA, 373 bp, Bos taurus
  Clone ID: 13-LIB2809-012-Q1-E1-D1
ggctggggccaccttctgagtgaggcactttggcacctgcctttgcttcttgtgcttcccagtgaaggctaggcaccccctgcttctgcaagcctcgcactgtccgctgggagcactgactcagggtaggcagcttatccactaagccgggggcatccagcatgctctctggttctgacccagacagaggagacgagaaacaagtcctcgtttgctccatggctggctctggcacaacatgagcattcggcttggccgtgcctcatgagtgcgaatgcctgtgcccaggatgtttctagcaggctttgccagccttgtctggagtcatcagtctggtaaggagcacagggatatagatggagactctggaggc

SEQ ID NO: 1283 - DNA, 308 bp, Bos taurus
  Clone ID: 13-LIB2809-016-Q1-E1-D9
ccaaggaaaccagccacccttgtgtagggtcatggtatagatgacattcacgggtcacacttagactagaaagataagttggttttgatcatcagttgtaaagcatgcatctgaagacctgtggaattaaaactaccccataggcatttccaagctgtaggttcctggtcagacgatctaatccaaagtgatcttccattacattttttttttttcccactgagaggaacaactcaaacatataaggatgcctttactctttcctaaactctgttgccgtccatcaattcccctgatacaggaacaaa

SEQ ID NO: 1284 - DNA, 378 bp, Bos taurus
  unsure (28): Clone ID: 13-LIB2809-017-Q1-E1-D9
gccatgggcacgggatacagacaagtcncctccgtattggacctccttccccaccccatcccacctctctaggtcaccacagagcactgagctgagctccctgtgctataaagcaggtttttcatcttgggatgccatatgatggcagaataataacaacacttctccgaatgggcagtggtgaggttgagcacagctattggctcttgctggctaggcaggtcccagcatcctgttcagaaagcacacgaagcctgggtgcttatgaagctgaaatgagagacctggtctgtgccttcgtggaagccagtgactgcaggatgttggctttgatcacaggagtatgtgccatgctctacagtcacacagggaaagttc

SEQ ID NO: 1285 - DNA, 294 bp, Bos taurus
  unsure (40): Clone ID: 13-LIB2809-019-Q1-E1-D1
gaacttgggtccctttgtccctgtaacctcagttgtctangcagaaacctggctttattctatttaaaggttgaaaatatacaataccaaatgctctgccactgttgagctccaaggatggaaaggaggagaacatttcttcctgtattaattggatagatggaggctacagagcttaagctaaactaaaggcatccttgtcttttgaattgttcctctcagttaggaaaaaaaaaaatctaatgaaagatcactgtagattagatcctctgaccaagcacctaacgcttggaa

SEQ ID NO: 1286 - DNA, 297 bp, Bos taurus
  Clone ID: 13-LIB2809-024-Q1-E1-D1
acgcgtcagcagacgcgtgggttctacgcccgcatctgtctgtgacacggcatcccaagagcgtcgtctccaaactctcaacctcaaacgcatcaacggaaaatgatgcagcatgtcgagcttgttgtggccgttctctctatctgcgtagttgcaacgctcggcgggagcttcaacacgctcatcgttgactaacacaagtcctagctcatggagctaacaatttttccggacttccttgggggactcactactgcgattcggtctactgcttcatgcacgattaagttggtcttc

SEQ ID NO: 1287 - DNA, 427 bp, Bos taurus
  Clone ID: 13-LIB2809-025-Q1-E1-D9
gggacaccctggacccaaggacaccatccagccttgtgtagggtcatggtatagatcagatccacggaacacaattagaatagaaagataagttggttttgatcatcagttgtaaagcatgcatctgatgacctgtggaattaaaactaccccacaggcatttccaagcggtaggtgcttggtcagaggatctaatctacagtgatcttccattagatttttttttttttcctactgagaggaacaactcaaaagacaaggatgcctttagtttagcctaagctctgtagcctccatctatccaattaatacaggaagaaatgttctcctcctttccatccttggagctcaacagtggcagagcatttggtattgtatattttcaacctttaaatagaataaagccaggtttctgcctagacaactg

SEQ ID NO: 1288 - DNA, 361 bp, Bos taurus
  Clone ID: 13-LIB2809-032-Q1-E1-D1
accgcaagaccttgactgaggcttaggatgtgagatgccatgaactttgctgaacagtgtctctgttcagcaaactaaccagcattccccacaacacagtctagggcagacgatagtatagaggagtgttggaagaaccttgggtccctttgtccctgtaacctcagttgtctaggcagaaacctggctttattctatttaaaggttgaaaatatacaataccaaatgctctgccactgttgagctccaaggatggaaaggaggagaacatttcttcctgtattaattggataaatggaggctacaaagcttaggctaaactaaaggcatccttgtcttttgagttgttcctctcagtaag

SEQ ID NO: 1289 - DNA, 135 bp, Bos taurus
  Clone ID: 13-LIB2809-026-Q1-E1-D1
tgattcccttgatgcgatgaatattgtatactattatgtgaataagttacactcctgaccctgaaagggttttgctcatttatattctatattgcagagaattgtatagaagattgcatggtcaacgacaacttc

SEQ ID NO: 1290 - DNA, 461 bp, Bos taurus
  Clone ID: 14-LIB2809-004-Q1-E1-D9
tcccggcagccatggccggggcatacattaagtttgaaatgccggtgctggacagttttgttgaaaaattaaaagaagaggaggaaagagaaataatcaaactgaccatgaagttccaagccctgcgtctgacaatgttacagcgcctggagcagctggtggaagccaagtagcccaccagcgcctgccccttccgaagcccccagcagccagtgcccactgagagccagtggccaggccctgacgggtcacccagattggtcacacggtcgaggaatctagcatctgcgcttctgcctgtccccctgcctagctagcatgagtcccatggccctggcccttggctccaagctgagcactcaggggcccagtcctaagcctgaggacccaggaacttgctgggtggggtctgcatgtgaggtgggcctgggctgtgagcagccctgaagctgtgacatgag

SEQ ID NO: 1291 - DNA, 379 bp, Bos taurus
  Clone ID: 14-LIB2809-006-Q1-E1-D5
gccatgggcccgaggataccctggacccaaggacaccatccagccttgtgtagggtcatgggatagatcagatccacggtacacaattagaatagaaagataagttggttttgatcatcagttgtaaagcatgcatctgatgacctgtggaattaaaactacgccacacgcatttccaagcggtaggtgcttggtcagaggatctaatctacagtgatcttccattagatttttttttttcctactgagaggaacaactcaaaagacaaggatgcctttagtttatcctaagctctgtagcctccatctatccagttaatacaggaagaaatgttctcctcctttccatccttggagctcaacactggcacaccatttg

SEQ ID NO: 1292 - DNA, 88 bp, Bos taurus
  Clone ID: 14-LIB2809-006-Q1-E1-D9
atggcggccggataaatgacttgagtctggatggtcatcccccccttgcgaaatctcatagctgtctcgttaccaggcttgatttttc

SEQ ID NO: 1293 - DNA, 70 bp, Bos taurus
  Clone ID: 14-LIB2809-012-Q1-E1-D5
acagctgcaatgcctgaatgggcatatctctctggggatacggcactgctttctggggaacaggcatgac

SEQ ID NO: 1294 - DNA, 402 bp, Bos taurus
  Clone ID: 14-LIB2809-013-Q1-E1-D5
actcttgcaaagaagttcttcaataatgttgactttactaatagctttaaaatccaaatcaaattctcaccctgatatttaagaaccaactgaatgcagctacttacagttcttttttaagacaaaaataactttaaatacaacagatcttttctcaggctgtcaatgatacagtaaagaaagatttttttaaacccgtaaaatgtcaataagtatcttttgtatgataggtaatttctaaaaaggtatttatttccccaatttgaaaaataagcatgcaggtaaatcaacagtttccattgggtcccttttagagttttgcaaaaccaagaagctttttctcttttgacagcattcttctctccataaaagaaataatgtttaggagcacatttcattatt

SEQ ID NO: 1295 - DNA, 398 bp, Bos taurus
  Clone ID: 14-LIB2809-016-Q1-E1-D5
accctggacccaaggacaccatccagccttgtgtagggtcatggtatagatcagatccacggaacacaattagaatagaaagataagttggttttgatcatcagttgtaaagcatgcatctgatgacctgtggaattaaaactaccccacaggcatttccaagcggtaggtgcttggtcagaggatctaatctacagtgatcttccattagattttttttttttcctactgagaggaacaactcaaaagacaaggatgcctttagtttagcctaagctctgtagcctccatctatccaattaatacaggaagaaatgttctcctcctttccatccttggagctcaacagtggcagagcatttggtattgtatattttcaacctttaaatagaataaag

SEQ ID NO: 1296 - DNA, 212 bp, Bos taurus
  Clone ID: 14-LIB2809-024-Q1-E1-D5
tttggactttctatttctattatttattccagctttattcttacgtcatatatatctactatcccttctaactttcggaaaagtctcattcagttaatgctctcgtggctggggttcttctccatcgctttgatttgtggcattctcacattttgtctcgctacttatccacccgttttctctctcatttattcctcctctcatactccacc

SEQ ID NO: 1297 - DNA, 434 bp, Bos taurus
  Clone ID: 14-LIB2809-030-Q1-E1-D5
accgcaaaaccttgactgaggcttaggatgtgagatgccatgaactttgctgaacagtgtctctgttcagcaaactaaccagcattccccacaacacagtctagggcaggcgatagtatagaggagtgttggaagaaccttgggtccctttgtccctgtaacctcagttgtctaggcagaaacctggctttattctatttaaaggttgaaaatatacaataccaaatgctctgccactgttgagctccaaggatggaaaggaggagaacatttcttcctgtattaattggatagatggaggctacagagcttaggctaaactaaaggcatccttgtcttttgagttgttcctctcagtaggaaaaaaaaaaaaatctaatggaagattactggtgattaaattccccggaccaagcacctaccgcttggaaatg

SEQ ID NO: 1298 - DNA, 420 bp, Bos taurus
  Clone ID: 14-LIB2809-026-Q1-E1-D5
cgatcccgcgcccatagagagccacaagtgtcccaaatcctttcttggtgacagcccaaatcggagaaggtcacgttagagtgaggcgcctgggtcctatcttttgcgctgaccgtgatcagttgacacagttgacagttctcctggtttgtgtcttagtacttgtagagaggtgagcgtagttggttggtgttaacaccaatttgttcaatttgttaccagtttgtgattttcaaacactctacgttgatattcgttattattccctggttttctttcgtttttaagtgcagtgagactgtctgctgcggtccacccgatcgatttgactattacccaaatcgactaaagcctacataacttatttagaacgaggtacttgctttaatgctagctcaaacggattgcgttttccaaaag

SEQ ID NO: 1299 - DNA, 432 bp, Bos taurus
  Clone ID: 15-LIB2809-005-Q1-E1-D3
ccatggcagccggatacggccagaccatgactgaagcttacgatgttagatgccatgaactttgccgaacaatgtctctgttcaacaaactaaccagcattccccacaacacagtctaaggcagacgatagtatagaggagtgttggaagaaccttgggtccctttgtccctgtaacctcagttgtctaggcagaaacctggctttattctatttaaaggttgaaaatatacaataccaaaatgctctgccactgttgagctccaaggatggaaaggaggagaacatttcttcctgtattaattggatagatggaggctacagagcttaggctaaactaaaggcatccttgtcttttgagttgttcctctcagtaggaaaaaaaaaaaaatctaatggaagatcactgtagattagatcctctgaccaagca

SEQ ID NO: 1300 - DNA, 415 bp, Bos taurus
  Clone ID: 15-LIB2809-006-Q1-E1-D3
gctcggcaccgccatgggagcgggatacgctgagcccaaggacaccatccagccttgtgtagggtcatggtatagatcagatccacggaacacaattagaatagaaagataagttggttttgatcatcagttgtaaagcatgcatctgatgacctgtggaattaaaactaccccacaggcatttccaagcggtaggtgcttggtcagaggatctaatctacagtgatcttccattagattttttttttttcctactgagaggaacaactcaaaagacaaggatgcctttagtttagcctaagctctgtagcctccatctatccaattaatacaggaagaaatgttctcctcctttccatccttggagctcaacagtggcagagcatttggtattgtatattttcaacctttaaat

SEQ ID NO: 1301 - DNA, 396 bp, Bos taurus
  Clone ID: 15-LIB2809-007-Q1-E1-D11
cgctatggcccgggataaccctagctccatccagggggctggggccaccttctgagtgaggcactttggaacctgcctttgcttcttgtgcttcccagtgaaggctaggcaccccctgcttctgcaagcctcgcactgtccgctgggagcactgactcagggtaggcagcttatccagtaagccgggggcatccagcatgctctctggttctgacccagacagaggagactaaaaacaaatcctcttttgctccatggctggctctggcacaacatgagcattcggcttggccgtgcctcatgagtgcgaatgcctgtgcccaggatgtttctagcaggctttgccagccctgtctggagtcatcagtgtggtaaggagcacaaggatatagatgg

SEQ ID NO: 1302 - DNA, 147 bp, Bos taurus
  Clone ID: 15-LIB2809-007-Q1-E1-D3
cgcaagaccatgactgaggcttaggatgtgagatgccatgaactttgctgaacactgtctctgttcagtcaactaaccaacattctccataatacagtctatggcagacgattctattcacgagtgttccatgacccttgggtccct

SEQ ID NO: 1303 - DNA, 413 bp, Bos taurus
  Clone ID: 15-LIB2809-008-Q1-E1-D11
cctgcacccaaggacaccatccagccttgtgtagggtcatggaatagatcagatccacgggacacaattagaatagaaagataagttggttttgatcatcagttgtaaagcatgcatctgatgacctgtgggattaaaactaccccacaggcatttccaagccgtaggtgcttggtcagaagatctacactacagtgatcatccatgagatttttttttttcctactgagaggagcaactcataagacaaggatgcctttagtttagcataagctctgtagcctccatctatccaattaatacaggaagaaatgttctcctcctttccaaccctggagctcaacagtggcacagcatttggtattgtgtattttcaacctttaaatacactaaagccagatttctgccaatac

SEQ ID NO: 1304 - DNA, 81 bp, Bos taurus
  Clone ID: 15-LIB2809-011-Q1-E1-D3
gctccgaactcgttcgattcatggcatgagtattcgatcatgtccactccacagcttggcgtcctcatggtcatcccctgt

SEQ ID NO: 1305 - DNA, 425 bp, Bos taurus
  Clone ID: 15-LIB2809-013-Q1-E1-D11
acccatgtatatatagctttatgtttgacccaactctggctcctaaaattctttcttttttgggaggcagctatgctcaccaccataccaccaatgtatctctttttgaagtctcaaaatgctgtagccatcttcttactatgaggggagctgaccaatatccccaagatggcagagtagaaagatgaaagaattttgacaatttcctgagctgctggaatcagcaattctggaaataaccaacctcaagatttcttgttatctagaataagaaatcttcctgttgtgaaagaaagaaaacaattcgtctgcagcagagaccacttttaccacaaactaaatgcttcctctttatcctaagcctaaagtatatcaggacattgagatttgcttttgagttttaggactgccctgctccacagata

SEQ ID NO: 1306 - DNA, 194 bp, Bos taurus
  Clone ID: 15-LIB2809-022-Q1-E1-D3
gggatccctttgtacggagatgcctatgagaatccagactggaaaaaggacatgtaggcctgtcagctcttcctgcaaattcacaaacacggggacaaccggtctggccacaaggtcatggaccaccacagtatagcccagcatccccccaactcccgtgcagacctagatgaacagcagaaaaccttacatgt

SEQ ID NO: 1307 - DNA, 387 bp, Bos taurus
  Clone ID: 15-LIB2809-024-Q1-E1-D3
gataccgcaaaaccttgactgaggcttaggatgtgagatgccatgaactttgctgaacagtgtctctgttcagcaaactaaccagcattccccacaacacagtctacggcagacgatagtatagaggagtgttggaagaaccttgggtccctttgtccctgtaacctcagttgtctaggcagaaacctggctttattctatttaaaggttgaaaatatacaataccaaatgctctgccactgttgagctccaaggatggaaaggaggagaacatttcttcctgtattaattggatagatggaggctacagagcttaagctaaactaaaggcatccttgtcttttgagttgttcctctcagtaagaaaaaaaaaaatctaatggaaga

SEQ ID NO: 1308 - DNA, 406 bp, Bos taurus
  Clone ID: 15-LIB2809-025-Q1-E1-D11
gccaagggcgcgggatccatatgacatagctacacgtattgtttggttgtacaattaattcttgggcaaaatttttgtcccaaaaattcattatgctgcaaagccgcatagccgtatcgaggaatgctcaagtattgaagccatgacaaccaaggcacgacggttttgagatttaccaacagccctgaaaatatcatcataaacacaaaagagatggtcatgagcagagttgctatagataccacactctgacctgctgctatagccagtgccatggaactagctgaataagccaccatcatcagggtaagcatcatgatgaagaacgcctccacctttggcttcagtcctaacaagaagtatgttatacaagtaaatataatacgtggtaacatcctcatgggga

SEQ ID NO: 1309 - DNA, 123 bp, Bos taurus
  Clone ID: 15-LIB2809-025-Q1-E1-D3
ggataacatgtagctattcttcatgtgtgtgtcaattctgtatctcaagagtctttcttttgtgggatgcattctcgcttcataccatactactattgttttccttttttccatctcaagatg

SEQ ID NO: 1310 - DNA, 398 bp, Bos taurus
  Clone ID: 15-LIB2809-030-Q1-E1-D11
actttggagccataggtttccgctgtgagccctataataaccctgcagacttcttcctggacatcattaatggagattcttctgctgtggtgttaaatagagaagacataggtgatgaagctaacgagaccgaagagccttccaaaaaagatactccactcatagaaaaattagctgagttttatgtcaactcctccttcttcaaggaaacaaaagttgaattagataaattctcaggggatcagagaaggaagaagcttccatcctacaaggaggtcacttatgccacctccttctgtcatcagctcaaatggatttccaggcgttcattcaaaaatttactgggtaatccccaggcttctatagctcagctaattgtgacagtcttcctgggactg

SEQ ID NO: 1311 - DNA, 414 bp, Bos taurus
  Clone ID: 15-LIB2809-031-Q1-E1-D3
actttggagccataggtttccactgtgagccctataataaccctgcagacttcttcctggacatcattaatggagattcttctgctgtggtgttaaatagagaagacataggtgatgaagctaacgagaccgaagagccttccaaaaaagatactccactcatagaaaaattagctgagttttatgtcaactcctccttcttcaaggaaacaaaagttgaattagataaattctcaggggatcagagaaggaagaagcttccatcctgcaaggaggtcacttatgccacctccttctgtcatcagctcaaatggatttccaggcgttcattcaaaaatttactgggtaatccccaggcttctatagctcagctaattgtgacagtcttcctgggactggttaaaaggggcaatt

SEQ ID NO: 1312 - DNA, 385 bp, Bos taurus
  Clone ID: 15-LIB2809-032-Q1-E1-D11
cgccatgaggcgcgggatacccatgtatatatagctttatgtttgacccaactctggctcctaaaattctttcttttttgggaggcagctatgctcaccaccataccaccaatgtatctctttttgaagtctcaaaatgctgtagccatcttcttactatgaggggagctgaccaatatccccaagatggcagagtagaaagatgaaagaattttgacaatttcctgagctgctggaatcagcaattctggaaataaccaacctcaagatttcttgttatctagaataagaaatcttcctgttgtgaaagaaagaaaacaattcgtctgcagcagagaccacttttaccacaaactaaatgcttcttccttatcccaagcctaaa

SEQ ID NO: 1313 - DNA, 382 bp, Bos taurus
  Clone ID: 16-LIB2809-001-Q1-E1-D11
accgcaagaccttgactgaggcttaggatgtgagatgccatgaactttgctgaacagtgtctctgttcagcaaactaaccagcattccccacaacacagtctagggcagacgatagtatagaggagtgttggaagaaccttgggtccctttgtccctgtaacctcagttgtctaggcagaaacctggctttattctatttaaaggttgaaaatatacaataccaaatgctctgccactgttgagctccaaggatggaaaggaggagaacatttcttcctgtattaattggatagatggaggctacagagcttaggctaaactaaaggcatccttgtcttttgagttgttcctctcagtaggaaaaaaaaaaatctatcggat

SEQ ID NO: 1314 - DNA, 429 bp, Bos taurus
  Clone ID: 16-LIB2809-012-Q1-E1-D11
acccatgtaaatacaactttaggtttgacccaactctggctcctaaaattctttcttttttgggaggcagctatgctcaccaccataccaccaatgtatctctttttgaagtctcaaaatgctgtagccatcttcttactatgaggggagctgaccaatatccccaagatggcagagtagaaagatgaacgaattttgacaatttcctgagctgctggaatcagcaattctggaaataaccaacctcaagatttcttgttatctagaataagaaatcttcctgttgtgaatgaaagaacacaattcgtctgcagcagagaccacttttaccacaaaccaaaggcttcttctttatcctaaccctaaggtataccaggacattgacatctgcttttaagtttaggactgccctgctccacagatatttcc

SEQ ID NO: 1315 - DNA, 332 bp, Bos taurus
  unsure (224): Clone ID: 16-LIB2809-012-Q1-E1-D7
acccatgtaaagatagctttatgtttgacccaactctggctcctaaaattctttcttttttgggaggcagctatgcgcaccaccataccaccaatgtctctctttttgacgtcgcaaaatgctgtagccatctgcttactaggaggggagctgaccagtatccccaggatcgcagactagagggatcacggaattttgacaacttcctgagctgcgcgagtcancagttctggaaataatcaacctcaagatttcttgttagctagaatacgaaatcttcctgttgtgaaacggggaaaacagttcgtctgcaggagaggacacttttacca

SEQ ID NO: 1316 - DNA, 391 bp, Bos taurus
  Clone ID: 16-LIB2809-015-Q1-E1-D7
accgaaataggcaagatgatgaaggcacgggctcacttttgtattgataaaggacatcaaacacagtcacgaggcactaataacaaggaagcatcatcaatcacgaaaagcaagcggtcagagtcttcagtcacttctctccctttaacatttggcaaacaaaatatgagatgttacattaaaatgtcaggtgatgtattattactctttagacacagaagggaagggatgaagtaaagagaggggacctcagatttcctgtattcttggattatccttcctttctgaggggctcagatgtctgtgtgcatctgtcaaaatgccagctctacctgaagattgaagagatggttggtagctgctgacatgggccctcaacactattaaaaag

SEQ ID NO: 1317 - DNA, 175 bp, Bos taurus
  Clone ID: 16-LIB2809-021-Q1-E1-D7
acgctatgggaaatctcctaaacccttcgatacatagcttgagtagtctcaaagttaagcacaatagcttggagatgacgtggtccaggactgtatccagtctgatgttgatatacactcacaattccataccttctatgagcccatcccttacagtgtcagacatgagatccct

SEQ ID NO: 1318 - DNA, 408 bp, Bos taurus
  Clone ID: 16-LIB2809-022-Q1-E1-D7
acactgggaccaaggacaccatccagccttgtgtagggtcatggtatagatcagatccacggaacacaattagaatagaaagataagttggttttgatcatcagttgtaaagcatgcatctgatgacctgtggaattaaaactaccccacaggcatttccaagcggtaggtgcttggtcagaggatctaatctacagtgatcttccattagattttttttttttcctactgagaggaacaactcaaaagacaaggatgcctttagtttagcctaagctctgtagcctccatctatccaattaatacaggaagaaatgttctcctcctttccatccttggagctcaacagtggcagagcatttggtattgtatattttcaacctttaaatagaataaagccatgtttct

SEQ ID NO: 1319 - DNA, 136 bp, Bos taurus
  Clone ID: 16-LIB2809-024-Q1-E1-D7
cttcagctctcttgcaagggccagagccaccaggcaggcaaggatgagaaccatcaaggtcctcaacattgccagcctggcggctctgaccattgctatagggggggggggactcactgtagcccgcgatcggggg

SEQ ID NO: 1320 - DNA, 461 bp, Bos taurus
  Clone ID: 16-LIB2809-029-Q1-E1-D7
accgcaagaccttgactgaggcttaggatgtgagatgccatgaactttgctgaacagtgtctctgttcagcaaactaaccagcattccccacaacacggtctagggcagacgatagtatagaggactgttggaagaaccttgggtccctttgtccctgtaacctcagttgtctaggcagaaacctggctttattcgatttagaggttgaaaatataggataccaaatgctctgccactgttgaactccaaggatggaaaggaggagaacatttctgcgtgtattaattggatagatggaggctacagagcttaggctaaactaaacgcatccttgtcttttgagttgttccgcgcagtaggaaaaacgaaaaatctaatggaggatcactgtagattagatgctctgaccaaccacctaccgcttggaaatgcctgtggggtacttttaattccacaagtc

SEQ ID NO: 1321 - DNA, 339 bp, Bos taurus
  Clone ID: 16-LIB2809-026-Q1-E1-D7
atatcccacacgtgggaagcgcttccatcgatacgttcactattgtatactctgaggtaaatacgttccgctaatgatcctgatacgtctttggtctctcaaattctcatggcgtgagaattggagagaagatagcacggccaacgataaactctaaacggtcccctcggtaatcactcacgtaagtgagatcaattcgcttcgcgtgagtccggcgtttggactgcccaaaggtctgctcggacgtcgattaatcaatgccggaagcgcgccccacaccgcctttcgctactcccgcgtgttggcgttggtgcgcgagtcagtgcgtcgcgtgcctgc

SEQ ID NO: 1322 - DNA, 447 bp, Bos taurus
  Clone ID: 17-LIB2809-001-Q1-E1-E1
ggacgctatggccgcgggacacccatgtatatatagctttatgtttgacccaactctggctcctaaaattctttcttttttgggaggcagctatgctcaccaccataccaccaatgtatctctttttgaagtctcaaaatgctgtagccatcttcttactatgaggggagctgaccaatatccccaagatggcagagtagaaagatgaaagaattttgacaatttcctgagctgctggaatcagcaattctggaaataaccaacctcaagatttcttgttatctagaataagaaatcttcctgttgtgaaagaaagaaaacaattcgtctgcagcagagaccacttttaccacaaactaaatgcttcttctttatcctaagcctaaagtatatcaggacattgagatttgcttttgagttttaagactgccctgctccacagatatt

SEQ ID NO: 1323 - DNA, 436 bp, Bos taurus
  Clone ID: 17-LIB2809-002-Q1-E1-E9
tgggcgcgggatacccatgtatatatagctttatgtttgacccaactctggctcctaaaattctttcttttttgggaggcagctatgctcaccaccataccaccaatgtatctctttttgaagtctcaaaatgctgtagccatcttcttactatgaggggagctgaccaatatccccaagatggcagagtagaaagatgaaagaattttgacaatttcctgagctgctggaatcagcaattctggaaataaccaacctcaagatttcttgttatctagaataagaaatcttcctgttgtgaaagaaagaaaacaattcgtctgcagcagagaccacttttaccacaaactaaatgcttcttctttatcctaagcctaaagtatatcaggacattgagatttgcttttgagttttaggactgccctgctccacagat

SEQ ID NO: 1324 - DNA, 414 bp, Bos taurus
  Clone ID: 17-LIB2809-006-Q1-E1-E1
gccatggccacgggatacagttgcaggagtataaatatagagtataaatggctctgtttgggaatctgtatctacacagggaaggtcaggggaaggctcagtttggtatcccaacctgctaaagtgattgagaagctagaatggggaaggacagggtctgggagcacacggctgcatcgatcccctttcccaggcttagttgaagctcacttactctccagggagaactaggtttgttgagggtaagaagcaagggcaagaagaggtgtaaataataatacaacgggggctctcaaaggcacagagaaggcatctgggccaagaaggagcacacttcttggatccacagacatgcacgcactccactgccacttgatgatcatgcttctgtgggcagtccagccatgccctggt

SEQ ID NO: 1325 - DNA, 422 bp, Bos taurus
  Clone ID: 17-LIB2809-010-Q1-E1-E1
accgcaagaccttgactgaggcttaggatgtgagatgccatgaactttgctgaacagtgtctctgttcagcaaactaaccagcattccccacagcacagtctagggcagacgatagtatagaggagtgttggaagaaccttgggtccctttgtccctgtaacctcagttgtctaggcagaaacctggctttattctatttaaaggttgaaaatatacaataccaaatgctctgccactgttgagctccaaggatggaaaggaggagaacatttcttcctgtattaattggatagatggaggctacagagcttaggctaaactaaaggcatccttgtcttttgagttgttcctctcagtaggaaaaaaaaaaatctaatggaagatcactgtagattagatcctctgaccaagcacctaccgc

SEQ ID NO: 1326 - DNA, 54 bp, Bos taurus
  Clone ID: 17-LIB2809-011-Q1-E1-E1
cgccatggccgcggggaccctggttagattgaggattgcctttgacgcatttcg

SEQ ID NO: 1327 - DNA, 112 bp, Bos taurus
  Clone ID: 17-LIB2809-013-Q1-E1-E1
aactaacttccttcccccaaagggcccctttcaattcggaaaaccttccttcccactggcataaaggaaccggcaaacccccgggaaaagccggtaaaaggctctgatggaa

SEQ ID NO: 1328 - DNA, 404 bp, Bos taurus
  Clone ID: 17-LIB2809-017-Q1-E1-E9
gccatgggcacgggataccgtgggcccaaggacaccatccagccttgtgtagggtcatggtatagatcagatccacggaacacaattagaatagaaagataagttggttttgatcatcagttgtaaagcatgcatctgatgacctgtggaattaaaactaccccacaggcatttccaagcggtaggtgcttggtcagaggatctaatctacagtgatcttccattagattttttttttttcctactgagaggaacaactcaaaagacaaggatgcctttagtttagcctaagctctgtagcctccatctatccaattaatacaggaagaaatgttctcctcctttccatccttggagctcaacagtggcagagcatttggtattgtatattttcaacctttaaa

SEQ ID NO: 1329 - DNA, 180 bp, Bos taurus
  Clone ID: 17-LIB2809-024-Q1-E1-E1
attctctctgatgtgctctgcatcagtttgctgtaactgcgtaaatcgttgttccttcattgcgattcatattatcaacctcgccaagtttctggagatggtggccactcatcactatggattcggctcgttcactctctatctccttcccaagttgcttcacacccaggtcccttgcct

SEQ ID NO: 1330 - DNA, 403 bp, Bos taurus
  Clone ID: 17-LIB2809-025-Q1-E1-E1
gccatgggcgcgggataaccctaactccctccatggggctggggccaccttctgagtgaggcactttggaacctgcctttgcttcttgtgcttcccagtgaaggctaagcaccccctgcttctgcaagcctcgcactgtccgctgggagcactgactcagggtaggcagcttatccagtaagccgggggcatccagcatgctctctggttctgacccagacagaggagactaaaaacaaatcctcttttgctccatggctggctctggcacaacatgagcattcggcttggccgtgcctcatgagtgcgaatgcccgtgcccaggatgtttctatcaggctttgccagccttgtctggagtcatcagtgtggtaaggagcacacagatatagatggagactct

SEQ ID NO: 1331 - DNA, 255 bp, Bos taurus
  Clone ID: 17-LIB2809-027-Q1-E1-E1
acaccatccagccttgtgtagggtcatggtatagatcagatccacggaacacaattagaatagaaagataagttggttttgatcatcagttgtaaagcatgcatctgatgacctgtggaattaaaactaccccacaggcatttccaagcggtaggtgcttggtcagaggatctaatctacagtgatcttccattagattttttttttttcctactgagaggaacaactcaaaagacaaggatgcccttagtttag

SEQ ID NO: 1332 - DNA, 375 bp, Bos taurus
  Clone ID: 17-LIB2809-028-Q1-E1-E1
ccagggggctggggccaccttctgagtgaggcactttggaacctgcctttgcttcttgtgcttcccactgaaggctaggcaccccctgcttctgcaagcctcgcactgtccgctgggagcactgactcagggtaggcagcttatccagtaagccgggggcatccagcatgctctctggttctgacccagacagaggagactaaaaacaaatcctcttttgctccatggctggctctggcacaacatgagcattcggcttggccgtgcctcatgagtgcgaatgcctgtgcccaggatgtttctagcaggctttgccagccttgtctggagtcatcagtgtggtaaggagcacaaggatatagatggagactctgg

SEQ ID NO: 1333 - DNA, 451 bp, Bos taurus
  unsure (411): Clone ID: 17-LIB2809-030-Q1-E1-E1
gccaagggcccgggagcccgcaaaaccttgaatgaggcttaggatgtgagatgccatgaactttgctgaacagtgtctctgttcagcaaactaaccagcattccccacaacacagtctagggcagacgatagtatagaggagtgttggaagaaccttgggtccctttgtccctgtaacctcagttgtctaggcagaaacctggctttattctatttaaaggttgaaaatatacaataccaaatgctctgccactgttgagctccaaggatggaaaggaggagaacatttcttcctgtattaattggatagatggaggctacagagcttaggctaaactaaaggcatccttgtcttttgagttgttcctctcagtaggaaaaaaaaaaaatctaatggaaaaatcaacggtnaataaaatctcctgaccaagcacctaccgcttggaaatgc

SEQ ID NO: 1334 - DNA, 355 bp, Bos taurus
  Clone ID: 17-LIB2809-026-Q1-E1-E1
gaagccaagagaattacaatacaaacataacttccttttcatgatgacttctaaacgatcgatgtcatcaggtctccaattaaaagcaggggagaccgatttggaacgcctacctcgttcctgacaccatgtaatgtagactcatgctggattacatttttttttttggtactcacaccaagtagtgaacacagaaccatcggtttactttacggtaacgtgtctacggtggatgtatggaattaatagatcaacaaatcttgtggtggtttggatggttccacgtgaagactccgacacgatttcctattctatattttgaccctttaaatacaatagccggacctttgtcggt

SEQ ID NO: 1335 - DNA, 428 bp, Bos taurus
  Clone ID: 18-LIB2809-001-Q1-E1-E9
accctgggcccaaggacaccatccagccttgtgtagggtcatggtatagatcagatccacggaacacaattagaatagaaagataagttggttttgatcatcagttgtaaagcatgcatctgatgacctgtggaattaaaactaccccacaggcatttccaagcggtaggtgcttggtcagaggatctaatctacagtgatcttccattagattttttttttttcctactgagaggaacaactcaaaagacaaggatgcctttagtttagcctaagctctgtagcctccatctatccaattaatacaggaagaaatgttctcctcctttccatccttggagctcaacagtggcagagcatttggtattgtatattttcaacctttaaatagaataaagccaggtttctgcctagacaactgaggttac

SEQ ID NO: 1336 - DNA, 412 bp, Bos taurus
  Clone ID: 18-LIB2809-009-Q1-E1-E9
actttggttggaatattaaagtaattctcttagagtatttccctctgaaagagagggggcttgaagaagaggaagaattagccaggttgcctcctttcctctcgctgctggacaggagatggagaggttgaggggcagggtctgtaggcagttcctaagagatagggttacaaaagaaaggctctgagatcacattgctgggggattcagaaggttactgagtaagttgttgggtgtcctgatatacaagctggttatacaaacaagttagatgttgggttcatttcattaattccactttctccttggattgagaaagcattagaaggcttctccccacggtgttgaacccttcactcattccttctattaccttctagcggaaaatacaggactggctgggggatggggt

SEQ ID NO: 1337 - DNA, 424 bp, Bos taurus
  Clone ID: 18-LIB2809-010-Q1-E1-E5
gataccaatgtatatatagctttatgtttgacccaactctggctcctaaaattctttctttttttgggaggcagctatgctcaccaccataccaccaatgtatctctttttgaagtctcaaaatgctgtagccatcttcttactatgaggggagctgaccaatatccccaagatggcagagtataaagatgaaagaattttgacaatttcctgagctgctggaatcagcaattctggaaataaccaacctcaagatttcttgttatctagaataagaaatcttcctgttgtgaaagaaagaaaacaattcgtctgcagcagagaccacttttaccacaaactaaatgcttcttctttatcctaagcctaaagtatatcaggacattgagatttgcttttgagttttaggactgccctgctccac

SEQ ID NO: 1338 - DNA, 217 bp, Bos taurus
  Clone ID: 18-LIB2809-011-Q1-E1-E5
gccatggcgccgggatacttgacaagcccttccacaggtctgggtcgggacagtttgtgtggggcgagtttagctgagcagcggaagtatactctgatgccacatacctcccattcaggtcactctgggcttactgcgtcgggcctgatgctttggctagtccaggattcaatgcaccttatgactgtgaatcttcacggttctgtccttgcttcta

SEQ ID NO: 1339 - DNA, 410 bp, Bos taurus
  Clone ID: 18-LIB2809-013-Q1-E1-E5
actaggaggacccctgaggctccccagtcacgtcgaagggactagcagtgtttcccatgagttcaggacagtgcttcccatgccaagtccatgggaagtaacaattttgggagtgacagttgaggctggtgctttgctagcacacttggggctgacagatgcttgctgtgtccagggctactcttccaagtctgaaacccccaagcctccacactgtgcctccagcctcctgcctccaggctggaatcttgtgcacattcatgcctgctagggacagacagaaatcctccacaaaaccagacatgtcagcatcagaaaaggctctgatggagacaggatgaacttcagaatgggcttagcctggacctcaaactaattctagtgataaattagtggaaagagaaagaaga

SEQ ID NO: 1340 - DNA, 443 bp, Bos taurus
  Clone ID: 18-LIB2809-015-Q1-E1-E5
acatatccatctgttcaccatccaaaacacagagcaagcccagtgcctgacattcaggaggtgctcagtggacaccagctgaatgaatgacgggtgaacggtgggcaggcaggcagatggcaagctagagcaatagtagggccgccccacaccccactagaacccagaacacctagggtcaaagttccctggcatccagccctggagccctcagcagggctacgttctcacgtctctgcacgagcaggcccttcctggggccaccagggctcactgagaggacgccccccctccccctgccagcctcaccctacacccaaccatcttacacagagatggaggcgtgggcttgagagggtcctgagaaggcgggatcacgttcattgcagttatttcttgaatgtttactctataccaggcactgcactcagcatttctcatac

SEQ ID NO: 1341 - DNA, 62 bp, Bos taurus
  Clone ID: 18-LIB2809-025-Q1-E1-E5
tccatggggctgtccctcccgtcacagtgccgtactttctggtctgccagtgcgtcttttgg

SEQ ID NO: 1342 - DNA, 187 bp, Bos taurus
  Clone ID: 18-LIB2809-029-Q1-E1-E5
acatgcagaggggacctcccctcaccgagtctccacccttccccagaaggtctgtggtattatccccacttcacagagaaggaaaccaggatggagaagtgacttgagtcactgcccaaggcatcctggatcctcgctgccagctctgcgtgtttagtggaagaacagacccacatgccccacgcca

SEQ ID NO: 1343 - DNA, 402 bp, Bos taurus
  Clone ID: 18-LIB2809-029-Q1-E1-E9
acccatgtatatatagctttatgtttgacccaactctggctcctaaaattctttcttttttgggaggcagctatgctcaccaccataccaccaatgtatctctttttgaagtctcaaaatgctgtagccatcttcttactatgaggggagctgaccaatatccccaagatggcagagtagaaagatgaaagaattttgacaatttcctgagctgctggaatcagcaattctggaaataaccaacctcaagatttcttgttatctagaataagaaatcttcctgttgtgaaagaaagaaaacaattcgtctgcagcagagaccacttttaccacaaactaaatgcttcttctttatcctaagcctaaagtatatcaggacattgagatttgcttttgagtttt

SEQ ID NO: 1344 - DNA, 421 bp, Bos taurus
  unsure (411): Clone ID: 18-LIB2809-026-Q1-E1-E5
cgatcccgggcccatttagctatacccgcgtgttggcgttggcgcgtgagtcagcgcgtcgcgtgcctgcttgccgtcgccgcacgcctatgacgtgagtgaaaccgcctaatcgccttatggagacactgaccccataagcgaccaaacatcatctcacgaaaaccggacgaaaaccggatcacggctaaaaaccggcgcttcgtccgctttctggataccgtggcggggggtcaggccgatgagaaaaatgcagcgcgaactgacacctccgcaaagggcagaccagtatccccataggaccgctttgggggtccaacgtgggtgctcgcgtgtggtccttggcagggtcggcgttacgccctaggtctggcggtttgtgggttgcccaacgctccgcgtttgtaatangtgagcgtct

SEQ ID NO: 1345 - DNA, 459 bp, Bos taurus
  Clone ID: 19-LIB2809-001-Q1-E1-E3
ggacgctatggccgcgggacaccgcaagaccttgactgaggcttaggatgtgagatgccatgaactttgctgaacagtgtctctgttcagcaaactaaccagcattccccacaacacagtctagggcagacgatagtatagaggagtgttggaagaaccttgggtccctttgtccctgtaacctcagttgtctaggcagaaacctggctttattctatttaaaggttgaaaatatacaataccaaatgctctgccactgttgagctccaaggatggaaaggaggagaacatttcttcctgtattaattggatagatggaggctacagagcttaggctaaactaaaggcatccttgtcttttgagttgttcctctcagtaggaaaaaaaaaaatctaatggaagatcactgtagattagatcctctgaccaagcacctaccgcttggaaatgcctgtggg

SEQ ID NO: 1346 - DNA, 399 bp, Bos taurus
  unsure (299): Clone ID: 19-LIB2809-004-Q1-E1-E3
ccataaccgccggataccctgggcccaaggacaccatccagccttgtgtacggtcatggtagagatcagatccacggaacacaattagaatagaaagataagttggttttgatcatcagttgtaaagcatgcatctgatgacctgtggaattaaaactaccccacaggcatttccaagcggtacgtgcttggtcagaggatctaatctacagtgatcttccattagattttttttttttcctactgagaggaacaactcaaaagacaaggatgcctttagtttagcctaagctctgtancctccatctatccaattaatacaggaagaaatgttcgccgcacttccatccttggagctcaacagtggcagagcatttgggattgtagattttcaacctt

SEQ ID NO: 1347 - DNA, 447 bp, Bos taurus
  unsure (48): Clone ID: 19-LIB2809-005-Q1-E1-E3
tgctgcggtagccatggcagccggatacgctgatcgaacatcacttcncttagtgaaaaatttcaagaacaaaattcccaaccttcatcggtgctgctcagaaaaaaaggatccaattctgcaatttaaaggctcatctggtggtcccactccaaaggctccgaagttttcacatcggttactgtggcagctcacaaagcacaaaaaaaaaaagtgattagtttgtagttcaaatagtaggagggggtcagatgtgataagataaacagacagattttaaatcgttaaagtcaaattccatagtaaagtttcttaactggtaaaggagctaagccatcaagctgatacataattggatttagcatagtaaactttcttaaccagaatatctttttagccgctcagcaaaacccccatggccatctatctgggctaacacacttaaaa

SEQ ID NO: 1348 - DNA, 449 bp, Bos taurus
  Clone ID: 19-LIB2809-010-Q1-E1-E3
gcatgcagcctaccgcgatgggcgcgggatacccatgtatatatagctttatgtttgacccaactctggctcctaaaattctttctttttttgggaggcagctatgctcaccaccataccaccaatgtatctctttttgaagtctcaaaatgctgtagccatcttcttactatgaggggagctgaccaatatccccaagatggcagagtagaaagatgaaagaattttgacaatttcctgagctgctggaatcagcaattctggaaataaccaacctcaagatttcttgttatctagaataagaaatcttcctgttgtgaaagaaagaaaacaattcgtctgcagcagagaccacttttaccacaaactaaatgcttcttctttatcctaagcctaaagtatatcaggacattgagatttgcttttgagttttaggactgccctgctcc

SEQ ID NO: 1349 - DNA, 260 bp, Bos taurus
  Clone ID: 19-LIB2809-011-Q1-E1-E3
ccatgtatatatagctttatgtttgacccaactctggctcctaaaattctttcttttttgggaggcagctatgctcaccaccataccaccaatgtatctctttttgaagtctcaaaatgctgtagccatcttcttactatgaggggagctgaccaatatccccaagatggcagagtacaaagatgaaagaattttgacaatttcctgagctgctggaatcagcaattctggaaacaaccaacctcaagatttcttgttat

SEQ ID NO: 1350 - DNA, 76 bp, Bos taurus
  Clone ID: 19-LIB2809-017-Q1-E1-E3
gatacacatataacaatcatacatataactatgttacactggaaaaccaaatctgaagtggaaactactgtgaaag

SEQ ID NO: 1351 - DNA, 390 bp, Bos taurus
  Clone ID: 19-LIB2809-028-Q1-E1-E3
acacgtattgtttgttgttacattgagtcctgggcagacattttgtcccaaaaattcattatgctgcaaagccgcatagccgtatcgaggaatgctcaagtattgaagccatgacaaccaaggcacgacggttttgagatttaccaacagccctgcgaatatcatcataaacacaaaagagactggtcatgagcagagttgctatagataccacactctgacctgctgctatagccagtgccatgggaactagctgaataagccaccatcatcagggtaagcctcatgatgaagaaggcctccacctttggcttcagtcctaacaagaagtatgttatacaagtaaatataatacttggtaacatcgtcatggggagtaaatcagataac

SEQ ID NO: 1352 - DNA, 403 bp, Bos taurus
  Clone ID: 19-LIB2809-030-Q1-E1-E11
acccatgtatatatagctttatgtttgacccaactctggctcctaaaattctttcttttttgggaggcagctatgctcaccaccataccaccaatgtatctctttttgaagtctcaaaatgctgtagccatcttcttactatgaggggagctgaccaatatccccaagatggcagagtagaaagatgaaagaattttgacaatttcctgagctgctggaatcagcaattctggaaataaccaacctcaagatttcttgttatctagaataagaaatcttcctgttgtgaaagaaagaaaacaattcgtctgcagcagagaccacttttaccacaaactaaatgcttcttctttatcctaagcctaaagtatatcaggacattgagatttgcttttgagtttta

SEQ ID NO: 1353 - DNA, 355 bp, Bos taurus
  unsure (241): Clone ID: 20-LIB2809-002-Q1-E1-E7
actctttggccttgatgaaggttcgaatgggctctgcactgtgctctggagacttcaatgctctctctgctttcccttcagctttcttgtctttgtcgtctttgagcagtggagtgttgtctgactcttctgtcccagactcgtcttcgtcactcgggagtttctgatagcgcagtccacctcccttcagcttcaggtctgtctggaagagacttgacctttctgaggacttcttgcctgngagaagcttactgcctgactgatcagatttttcatcttcctcggtaataggatccaagggtgaggcatcattggtggaaactcctgatgaggaataatctataacatctcccct

SEQ ID NO: 1354 - DNA, 444 bp, Bos taurus
  Clone ID: 20-LIB2809-005-Q1-E1-E7
accctgggccaaaggacaccatccagccttgtgtagggtcatggtataaatcagatccacggaacacaattagaatagaaagataagttggttttgatcatcagttgtaaagcatgcatctgatgacctgtggaattagaactaccccacaggcatttccaagcggtaggtgcttggtcagaggatcaaatctacagtgatcttccattagatttttttttttcctactgagaggaacaactcaaaagacaaggatgcctttagtttagcctaagctctgtagcctccatctatccaattaatacaggaagaaatgttctcctcctttccatccttggagctcaacagtggcagagcatttggtattgtagattttcaacctttaaatagaataaggccaggtttctgcctagacaactgaggttacatggacaaagggactca

SEQ ID NO: 1355 - DNA, 89 bp, Bos taurus
  Clone ID: 20-LIB2809-008-Q1-E1-E7
cccatccgcccgggatacacactgactccctccaggggcctgtggccaccttctgactgaggctctttggaacctccctatgcttcttg

SEQ ID NO: 1356 - DNA, 279 bp, Bos taurus
  Clone ID: 20-LIB2809-009-Q1-E1-E11
ggatacaacagatccttgactgaggcctaggatgtgagatgccacgaactttgctgaacagtgtctctgttcagcaaactaaccagcatgccccacaccacagtctagggcagacgatagtatagaggagtgttcggagaacgttgggtccctttgtcccggtaaactcggttgtctaggcagagacctgccattactctatttagcggttcaaactgttcacgaccaaatgctctggcatagtagagctccgacgatgcacaggaggacaacatttct

SEQ ID NO: 1357 - DNA, 305 bp, Bos taurus
  Clone ID: 20-LIB2809-009-Q1-E1-E7
gggatacacaggaacttcgaaggtctggttacttagtttcttatcgcttcctgtctctgcatgaaactccctgacaaggggattgtttggggcgttgttaagtgggggttgtttcaaataagacttaaaaaacaaaacccctcctgaacgattcatatctcagactgttacacaaaagccctctgtgttctgtctgttgaagtcagttcagagcacgggaagttcggtggggctgtgacttacctggttgaggaagttacccatccgtattctgggtccctgggaaggttttcaaagcttcacgt

SEQ ID NO: 1358 - DNA, 91 bp, Bos taurus
  Clone ID: 20-LIB2809-010-Q1-E1-E7
ggacatctggccaatacaaatttgattaaaaacgtgaacgtatcacagtgattttttaaacgtcacaccttactttatcagctgagttctc

SEQ ID NO: 1359 - DNA, 418 bp, Bos taurus
  Clone ID: 20-LIB2809-019-Q1-E1-E11
actgtcaacacgtcctatggaacaagacaggggcccgtgtgtgagggccacacaacagggtaaaggtctcaggtgccagaaagcatccccggggaagggccatgcaagctgacaacaatgggtggaaggcgtgaacaggcgcgcgtccaggcggccccacagagttgtgggtgtctcaccagtaaccaggaaatgagacaaacgcggagtgcatgtctgcctatcagatttgcaggcgttaagaagcacattatccatggggaacgctggccatgaacggagcttcccataaactgcaggtggcggtgcctccagacaccaggcaactcttgtgtgtaaaacgcacgttcttcctgactgcgctctgggcgtcatctcagtgagatgcttgcacacacacaggaatccatgggctgcg

SEQ ID NO: 1360 - DNA, 415 bp, Bos taurus
  Clone ID: 20-LIB2809-026-Q1-E1-E7
ggatcccgcgcccatatgagtacacgccggcggtcgacctgcacgatatcccacacgtgggaagcgcttccatcgatacgttcactattgtatactctgaggtaaatacgttccgctaatgatcctgatacgtctttggtctctcaaattctcatggcgtgagaattggagagaagatagcacggccaacgataaactctaaacggtcacctcggtaatcactcacgtaagtgagattaattcgcttcgcgtgagtcgggcgtttggactgcccaaaggtctgctcggacgtcgattaatcaatgccggaagcgcgccccacaccgcctttcgctattcccgcgtgttggcgttggtgcgtcagtcagtgcgtcgcgtgcctgcttgccgtcgccgcacgcctatgacgtgagtg

SEQ ID NO: 1361 - DNA, 407 bp, Bos taurus
  Clone ID: 21-LIB2809-002-Q1-E1-F1
actgatgccctggctcggcagagggaggcagctgcccgcctgctgaaggtgctcacagacctggaccaagcccacgaggagttccagcagcaggaacaggggaaggtggtttcgggccccctgaggccctaaggagatgccagagtcagcctggaaggaggagggaggagccagtgggcccttctcaacatcccctggcccaggaatcccctcgtggctgccctgcacctcactgatgctgtgacttgcaggctcctatagatatcctagtcccatgtgtcctaagcccggaacttaggcatggaagtcctttggctggggaccagccttgcactgaatgaatctctccctctgggttgaggcagactggagtggatggaataaggaatctgacttccttggctcac

SEQ ID NO: 1362 - DNA, 403 bp, Bos taurus
  Clone ID: 21-LIB2809-003-Q1-E1-F1
gggatacctttaacaagagaacttgtggaaatccagctggcaactcaagaagttcaagaagcaagaccacaaagggtaaaccccgggattctggccaagaagtttggtgccccaccttgtttaaaaaaaaaactggacctaaatggcgcaacatgactttgttcccgcttggctaaatttctcaacaccccagtcagctaagtcacctacagcgactttcgaaaaacacggagagtacctaccccgaggagatggtagatttggagtaagccgtcgtagacataattcctctgatggctttttcaacaatggacctcttcgaactacaggagattcttggcaccagccctccctgtttcgccatgattctgtggactctggtgtctctaagggagcatatgct

SEQ ID NO: 1363 - DNA, 437 bp, Bos taurus
  Clone ID: 21-LIB2809-008-Q1-E1-F9
gacatgggcccgggataccgcaaaaccttgactgaggcttaggatgtgagatgccatgaactttgctgaacagtgtctctgttcagcaaactaaccagcattccccacaacacagtctagggcagacgatagtatagaggagtgttggaagaaccttgggtccctttgtccctgtaacctcagttgtctaggcagaaacctggctttattctatttaaaggttgaaaatatacaataccaaatgctctgccactgttgagctccaaggatggaaaggaggagaacatttcttcctgtattaattggatagatggaggctacagagcttaggctaaactaaaggcatccttgtcttttgagttgttcccctcagtaggaaaaaaaaaaatctaatggaagatcactgtaaattagatcctctgaccaagcacctaccg

SEQ ID NO: 1364 - DNA, 272 bp, Bos taurus
  Clone ID: 21-LIB2809-011-Q1-E1-F1
acagttgcaggagtataaatatagagtataaatggctctgtttgggaatctgtatctacacagggaaggtcaggggaaggctcagtttggtatcccaacctgctaaagtgattgagaagctagaatggggaaggacagggtctgggagcacacggctgcatcgatcccctttcccaggcttagttgaagctcacttactctccacggagaactacgtttgttgagggtaagaagcaagagcaacaagaagtgttgataataatacaacgggg

SEQ ID NO: 1365 - DNA, 344 bp, Bos taurus
  unsure (130),(227),(317): unsure at all n locations; Clone ID: 21-LIB2809-012-Q1-E1-F1
gaacccatgtatatatagctttatgtttgacccaactctggctcctaaaattctttctttttttgggaggcagctatgctcaccaccataccaccaatgtatctctttttgaagtctcaaaatgctgtanccatcttcttactattaggggagctgagcaatatccgcaacatcgcagactagaaggatgaaagaattttgacaatttcctgagctgctggaatcancggttcgcgacataaccaacctcaagatttcttgttatctagaataagaaatcttcctgttgtgaaagaaagagaacaattcgtctgcancagaggacacttttaccacaaactaaa

SEQ ID NO: 1366 - DNA, 432 bp, Bos taurus
  unsure (90),(147): unsure at all n locations; Clone ID: 21-LIB2809-014-Q1-E1-F1
acaccctggatccctccaaggggctggggccaccttctgagtgaggcactttggaacctgccttgcttctgtgcttccagtgaaggctangcaccccctgcttctgcaagcctcgcactgtccgctgggagcactgactcagggtangcagcttatccagtaagccgggggcatccagcatgctctctggttctgacccagacagaggagactaaaaacaaatcctcttttgctccatggctggctctggcacaacatgagcattcggcttggccgtgcctcatgagtgcgaatgcctgtgcccaggatgtttctagcaggctttgccagccttgtctggagtcatcagtgtggtaaggagcacaaggatatagatggagactctggaggccaagtgaaagtggcagcttgctcaactttgtaaagagaaac

SEQ ID NO: 1367 - DNA, 271 bp, Bos taurus
  Clone ID: 21-LIB2809-016-Q1-E1-F1
gctccaacacccagtccacccggtcgcaagtccagtcattccggcgcacgctgttcgcggtgcagaccagtgcggtgtggaagcagtacaggaagatacaatttctccagcgccaatagttatttcagccagaacaccgcgcgaggaaagccgagaccgcgcctgccgatggacgcaggacggctggcagcctcggcgcaaacctctctgcttcttgccgcgaccgcgctcacgcaggcggcgctggaccgtaacggcaagccgcttgcgt

SEQ ID NO: 1368 - DNA, 351 bp, Bos taurus
  Clone ID: 21-LIB2809-027-Q1-E1-F1
catatgacatagctacacgtattgtttgttgttacattgagtcctgggcagaagttttgtcccaaaaattcattatgctgcaaagccgcatagccgtatcgaggaatgctcaagtattgaagccatgacaaccaaggcacgacggttttgagatttaccaacagccctgaaaatatcatcataaacacaaaagagatggtcatgagcagagttgctatagataccacactctgacctgctgctatagccagtgccatggaactagctgaataagccaccatcatcagggtaagcatcatgatgaagaaggcctccacctttggcttcagtcctaacaagaagtatgttata

SEQ ID NO: 1369 - DNA, 410 bp, Bos taurus
  Clone ID: 21-LIB2809-030-Q1-E1-F1
gcatgcctccagccgccaagggcccgggatacccatgaatatatagctttatgtttgacccaactctggctcctaaaattctttcttttttgggaggcagctatgctcaccaccataccaccaatgtatctctttttgaagtctcaaaatgctgtagccatcttcttactatgaggggagctgaccaatatccccaagatggcagagtagaaagatgaaagaattttgacaatttcctgagctgctggaatcagcaattctggaaataaccaacctcaagatttcttgttatctagaataagaaatcttcctgttgtgaaagaaagaaaacaattcgtctgcagcagagaccacttttaccacaaactaaatgcttcttctttatcctaagcctaaagtatatcaggaca

SEQ ID NO: 1370 - DNA, 123 bp, Bos taurus
  Clone ID: 21-LIB2809-032-Q1-E1-F9
gatgccactcaaacgcatgaattcgctggtcgcacatgggatactgcactgcgtcatgtccagcgatcacgacttcgcaacgggtccaggatcttgtcgagatgcgccgaccattcagaaatg

SEQ ID NO: 1371 - DNA, 223 bp, Bos taurus
  Clone ID: 21-LIB2809-026-Q1-E1-F1
cagcggcaaattcggggggtcaaactctatctccaccacgtcaacgggaggggtcacccgcaggtccacatggtcctcgacaaatcccacaagcctcactctcgcgacaacaacatgattcgacaaaaaaggaacatgggtcgcctcttcagcatgcatcggctccatcacaagaaactggttctcgtccacagccgtagaacaaactccagtactcgccggc

SEQ ID NO: 1372 - DNA, 452 bp, Bos taurus
  Clone ID: 22-LIB2809-005-Q1-E1-F5
cggataccctgggcccaaggacaccatccagccttgtgtagggtcatggtatacatcagatccacggaacacaattagaatagaaagataagttggttttgatcatcagttgtaaagcatgcatctgatgacctgtggaattagaactaccccacaggcatttccaagcggtaggtgcttggtcagaggatcaaatctacagtgatcttccattagattttttttttttcctactgagaggaacaactcaaaagacaaggatgcccttagtttagcctaagctctgtaacctccatctatccaattaatacaggaagaaatgttctcctcctttccatccttggagctcaacagtggcagagcatttggtattgtatattttcaacctttaaatagaatagagccaggtttctgcctagacaactgaggttacagggacaaagggacccaag

SEQ ID NO: 1373 - DNA, 407 bp, Bos taurus
  Clone ID: 22-LIB2809-006-Q1-E1-F5
acttaatatgtctacaggtatgctatgcaagacagaccatataaaatttagatgaaattcactctaggacatacatgactgttatttttattcttattagatttttaagttactttttttcagttaaatgtccaggaccagctgggactcaaaactttttaaacagcaaactggaccaaaaaaaaaatagaacaacagagaagaaaataattagcaagggaatgttttaacatttggactagatctcttctacagcatatatactttcctagatcttatgaaaaataaaattgccataccccatattttacatatatcatctctaactaaagcaacccaaaatttctcactttataataatcagtaactatatttatttaatttccctcatgcaaattctcccccat

SEQ ID NO: 1374 - DNA, 326 bp, Bos taurus
  Clone ID: 22-LIB2809-009-Q1-E1-F5
accgcaagaccttgactgaggcttaggatgtgagatgccatgaactttgctgaacagtgtctctgttcagcaaactaaccagcattccccacaacacagtctagggcagacgatagtatagaggagtgttggaagaaccttgggtccctttgtccctgtaacctcagttgtctaggcagaaacctggctttattctatttaaaggttgaaaatatacaataccaaatgctctgccactgttgagctccaaggatggaaaggaggagaacatttcttcctgtattaattggatagatggaggctacagagcttaggctaaactaaag

SEQ ID NO: 1375 - DNA, 385 bp, Bos taurus
  Clone ID: 22-LIB2809-009-Q1-E1-F9
accctgggcccaaggacaccagtccagccttgtgtagggtcatggtatagatcagatccacggaacacaattagaatagaaagataagttggctttgatcatcagttgtaaagcatgcatctgatgacctgtggaattaaaactaccccacaggcatttccaagcggtaggtgcttggtcagaggatctaatctacagtgatcttccattagattttttttttttcctactgagaggaacaactcaaaagacaaggatgcctttagtttaacctaagctctgtagcctccatctatccaattaatacaggaagaaatgttctcctcctttccatccttggagctcaacagtggcagagcatttggtattgtatactttcaacctt

SEQ ID NO: 1376 - DNA, 406 bp, Bos taurus
  Clone ID: 22-LIB2809-013-Q1-E1-F5
actttggttggaatattaaagtaattctcttagagtatttccctctgaaagagagggggcttgaagaagaggaagaattagccaggttgcctcctttcctctcgctgctggacaggagatggagaggttgaggggcagggtctgtaggcagttcctaagagatagggttacaaaagaaaggctctgagatcacattgctgggggattcagaaggttactgagtaagttgttgggtgtcctgatatagaagctggttatacaaacaagttagatgttgggttcatttcattaattccactttctccttggattgagaaagcattagaaggcttctccccacggtgttgaaccctttcactcatttcttctattaaccttccaacggaaaattcaggactggctgggg

SEQ ID NO: 1377 - DNA, 440 bp, Bos taurus
  Clone ID: 22-LIB2809-014-Q1-E1-F5
accctgggcccaaggacaccatccagccttgtgtagggtcatggtatagatcagatccacggaacacaattagaatagaaagataagttggttttgatcatcagttgtaaagcatgcatctgatgacctgtggaattaaaactaccccacaggcatttccaagcggtaggtgcttggtcagaggatctaatctacagtgatcttccattagatttttttttttttcctactgagaggaacaactcaaaagacaaggatgcctttagtttagcctaagctctgtagcctccatctatccaattaatacaggaagaaatgttctcctcctttccatccttggagctcaacagtggcagagcatttggtattgtatattttcaacctttaaatagaataaagccaggtttctgcctagacaactgaggttacagggacaaagg

SEQ ID NO: 1378 - DNA, 302 bp, Bos taurus
  Clone ID: 22-LIB2809-015-Q1-E1-F9
aacacgcgtcagcccaggcgtccggccacatctccgcgcaggattcccgggttgccttacggattctggtcgtggcagaactcatagctgaccatgagggcaaggtggacatacttcagcacaaattgtacaaggggtagtgtgctcatgataaagatcattgtccacggaaagggtatccatgcggtgtacaagatcaatgccctgagacttcaagacccgtcacttctggctagttgaccggcatactacaattgtatcatctagtgccggcttcaccggatgtcgtataaacgggagag

SEQ ID NO: 1379 - DNA, 341 bp, Bos taurus
  Clone ID: 22-LIB2809-023-Q1-E1-F5
gcgaccggcccgggataccatgcacccaaggacaccatccagccttgtgtaaggtcatggtatacatcagatccacggaacacaattagaatagaaagataagttggttttgatcatcagttgtaaagcatgcatctgatgacctgtggaattaaaactaccccacaggcatttccaagcggtaggtgcttggtcagaggatctaatctacagtgatcttccattagatttttttttttcctactgagaggaacaactcataagacaatgatgcctttagtttaacctaagctctgtagcctccatctatccaatttatactggaagaaatgttctcctcc

SEQ ID NO: 1380 - DNA, 267 bp, Bos taurus
  Clone ID: 22-LIB2809-023-Q1-E1-F9
gataccaaagcagggctgttatcatcattcctctctggtgctcctggcataccttcagtgggcctggcacagttttgggattgctcaggttgcctcctgaccacgcgctgctgatcatgattctgagacgctgacgggcagggtctgtcagcaatgcctatcacataggcttacgcatgctcagctcttccataccattgctattggatcctctatgtttcttattggcttgatgggtgtcctgatatatgggctggttataccact

SEQ ID NO: 1381 - DNA, 386 bp, Bos taurus
  Clone ID: 22-LIB2809-028-Q1-E1-F5
atatagctttatgtttgacccagctctggctcctaaaattctttcttttttgggaggcagctatgctcagcaccagacgaccaatgtatctctttttgaagtctcaaaatgctgtaaccatcttcttactatgaggggagctgaccaatatccccaagagggcagagtagaaagatgaaagaattttgacaatttcctgagctgctggaatcagcaattctggaaataaccaacctcaagatttcttgttatctagaataagaaatcttcctgttgtgaaagaaagaaaacaattcgtctgcagcagagaccacttttaccacaaactaaatgcgtcgtctttatcctaagcctaaagtatatcaggacattgagatttgcttttg

SEQ ID NO: 1382 - DNA, 438 bp, Bos taurus
  unsure (421): Clone ID: 22-LIB2809-028-Q1-E1-F9
cgccatgggcccgggatacccatgtatatatagctttatgtttgacccaactctggctcctaaaattctttcttttttgggaggcagctatgctcaccaccataccaccaatgtatctctttttgaagtctcaaaatgctgtagccatcttcttactatgaggggagctgaccaatatccccaagatggcagagtagaaagatgaaagaattttgacaatttcctgagctgctggaatcagcaattctggaaataaccaacctcaagatttcttgttatctagaataagaaatcttcctgttgtgaaagaaagaaaacaattcgtctgcagcagagaccacttttaccacaaactaaatgcttcttctttatcctaagcctaaagtatatcaggacattgagatttgcttttgagttttangactgccctgctccaca

SEQ ID NO: 1383 - DNA, 348 bp, Bos taurus
  unsure (332): Clone ID: 22-LIB2809-029-Q1-E1-F5
actccaaaaaagtgatgggacatgtttgtgtccaatttctcagacttccattactttggataaacattcttcaagtatactatacagcagacattttaatcttgtcatggaaatgccctgaaagagttttaaaatgaccataattacgaataccagtccttaagataattttgctgaataaagaagtagagggggtgggggaccatttctgctttttctgccacatagattgacggcagcttgttcaaacagtgccttatcatgcttgaacacaaggtagtcaccctcagttcttctattgctggattttaccatctttagctgtgcattanacaacaacaacaccct

SEQ ID NO: 1384 - DNA, 432 bp, Bos taurus
  Clone ID: 22-LIB2809-032-Q1-E1-F5
accgcaagaccttgactgaggcttaggatgtgagatgccatgaactttgctgaacagtgtctctgttcagcaaactaaccagcattccccacaacacagtctagggcagacgatagtatagaggagtgttggaagaaccttgggtccctttgtccctgtaacctcagttgtctaggcagaaacctggctttattctatttaaaggttgaaaatatacaataccaaatgctctgccactgttgagctccaaggatggaaaggaggagaacatttcttcctgtattaattggatagatggaggctacagagcttaggctaaactaaaggcatccttgtcttttgagttgttcctctcagtaggaaaaaaaaaaaatctaatggaagatcactgtagattagattctctgaccaagcacctaccgcttggaaatg

SEQ ID NO: 1385 - DNA, 385 bp, Bos taurus
  Clone ID: 22-LIB2809-026-Q1-E1-F5
ttgacatatcatatcgaatccaccactgccctccgcgctccggcctgtcgttctgcgcgaaaaactgattcccaaaggcatgtgagctcctgccatcctcatttgctccactagcccagcgtcgtgttccaattcgcaatgccatcattatccgtatccttcacaatgccgtgtgacaccaccacagagtataccccctttccatccttcagaactttcctctgccccttagccccgcccccagtatacacccactgctgaccaacgatttcgtgcgcccccgtgacatacggtaggtcatagttttcaccacccactcgtctctagctaacgctctacgtccccctgcacttcgatcacgtccggcagttttggccggtcctct

SEQ ID NO: 1386 - DNA, 404 bp, Bos taurus
  Clone ID: 23-LIB2809-007-Q1-E1-F11
tgggcccgggatacatcaattatacctcaaaaaagcctgaggaggaggtaaagagttatatcagaaaactcgggagccccaaggcctgggagatgggacagaggaagctctgatttaaaactcacttttcagctcctacaagcaatgcccagaccagctcgcctgccagtctaggggtgttctcccaggctccaaggcttcctgcttctcctccatctctcaaaacctggcttggggcccttggcttgagagtaaccccatgctggggatgtgctaagtcaaaagaaagaaagaaagaaagaaattgagaatcatatttctagaacgagatgtatgaaaaggtcagaatgtggtatcattgtctcatgaatcctgaactacagtcctcattcccagtcccaatt

SEQ ID NO: 1387 - DNA, 87 bp, Bos taurus
  Clone ID: 23-LIB2809-008-Q1-E1-F3
caagaacaaatacgactagactttcaaccctctaaacccctcttaattctatatcttactccaattcactcccctctcattttaata

SEQ ID NO: 1388 - DNA, 357 bp, Bos taurus
  Clone ID: 23-LIB2809-011-Q1-E1-F3
agttgcaagggtagaaatagcgagtataactggctctgtttgggaatctgtatctacacagggaaggtcaggggaaggctcagtttggtatcccaacctgctaaagtgattgagaagctagaatggggaaggacagggtctgggagcacacggctgcatcgatcccctttcccaggcttacttgaagctcacttactctccagggagaactaggtttgttgagggtaacaaccaagagcaggaacaggtgtaaataataatacaccgggggctctcaaaggcacagcgaatgcatctgggccaacaaggagtcaccacttcctggatccatacacatgcccccactccactgccact

SEQ ID NO: 1389 - DNA, 273 bp, Bos taurus
  Clone ID: 23-LIB2809-012-Q1-E1-F3
gacgggggcttaggatgtaaaatgccatgaacttggctgaacagtgtctctgttcagcaaagtagccagcattccccacaacagagtctacggcagacgagagtatagaggagtgttgcaagaaccttgagtcgctttgtcgctgtaacctcagtggtctaggcagaaacctggctttattctatttaaaggttgagaatggacaatatcagatgcgctgcgactgttgagctccaaggatggaaaggaggagaacatttcttcctgtattaa

SEQ ID NO: 1390 - DNA, 393 bp, Bos taurus
  Clone ID: 23-LIB2809-015-Q1-E1-F3
acctgactccatccatggggctggggccaccttctgagtgaggcactttggaacctgcctttgcttcttgtgcatcccattgaaggctaggcaccccctgcttctgcaaacctcgcactgtccgctgggagcactgactcagggtaggcagcttatccattaaaccgggggcatccagcatgctctctggttctgacccatacataggagactacaaacaaatcctcttttgctccatggctggctctggcacaacatgagcattctgcttggccgtgcctcatgactgcgaatgcctgtgccaaggatgtttctatcaggctttgccatccttgtccggagtcatcagtgtggtaaggagcatacggatatagatggagactctggaggcca

SEQ ID NO: 1391 - DNA, 443 bp, Bos taurus
  Clone ID: 23-LIB2809-018-Q1-E1-F3
gccatggtagcgggatacggctgcatcctgagaaagatgacataggattagagttgcttccctgtttcagtccatgccctcatttgcccactgaacacttgggtttgggacatgaccttcaggtcccttcagggctccaagggctctttgcagtctaggggcacagcctgaggctgacctgggccctctcgcatctgcctggtggtcgcaggaagttgcctccacccagaagcaaagatggtcctcggtcccagacagctggacaacggaagtgttgtgggtcagcactggccctcagcactcctggatgggggcagggaaggtgggcaaaactttggaaagccaagcacggggtaatcctgggttccaggcacgattctagtcattggattgtcaagcagcggtggccgaagagctgggtgatgatggatgggttcactaca

SEQ ID NO: 1392 - DNA, 378 bp, Bos taurus
  unsure (227),(277),(280),(377): unsure at all n locations; Clone ID: 23-LIB2809-024-Q1-E1-F11
cgccaagggcccgggataccgcaaaaccttgactgaggcttaggatttaaaatgcaatgaactttgctgaacattgtcccggttcaccaaactaaccagcattccccacaacacattctagggcagacaatagtatagaggattgttggaaaaaccttgggtccctttgtccctgtaacctcagttgtctaagcagaaacctggctttattctatttaaaggttganaatatacaataccaaatgctctgccactgttgagctccaaggatggaaangangagaacatttcttcctgtattaattggatagatggaggctacagagcttaagctaaactaaaggcatccttgtcttttgagttgttcctctcagtang

SEQ ID NO: 1393 - DNA, 362 bp, Bos taurus
  Clone ID: 23-LIB2809-028-Q1-E1-F3
tgaggcttaggatgtgagatgccatgaactttgctgaacagtgtctctgttcagcacactaagcagcattccccagaacacagtctacggcagacgagagtatagaggagtgttggaagaaccttgggtccctttgtccctgtaacctcagttctcgggcggaaacctggctttagtctatttaaaggttgaaaatatacaataccaaatgctctgccactgttgagctccaaggatggaaaggaggagaacatttcttcctgtattaattggatagatggaggctacagagcttaggctaaactaaaggcatccttgtcctttgagttgttcccctcactaggaaaaaaaaaaaatctaat

SEQ ID NO: 1394 - DNA, 388 bp, Bos taurus
  Clone ID: 23-LIB2809-031-Q1-E1-F3
acaccctagctccctccagggggctggggccaccttctgagtgaggcactttggaacctgcctttgcttcttgtgcttcccagtgaaggctaggcaccccctgcttctgcaagcctcgcactgtccgctgggagcactgactcagggtaggcagcttatccagtaagccgggggcatccagcatgctctctggttctgacccagacagaggagactaaaaacaaatcctcttttgctccatggctggctctggcacaacatgagcattcggcttggccgtgcctcatgagtgcgaatgcctgtgcccaggatgtttctagcaggctttgccagccttgtctggagtcatcagtgtggtaaggagcacaaggatatagatggagactct

SEQ ID NO: 1395 - DNA, 436 bp, Bos taurus
  unsure (426): Clone ID: 23-LIB2809-032-Q1-E1-F11
ccgagctccatgggcccgaccgccatgaggcgcgggataccctgggaccaaggacaccatccagccttgtgtagggtcatggtatagatcagatccacggaacacaattagaatagaaagataagttggttttgatcatcagttgtaaagcatgcatctgatgacctgtggaattaaaactaccccacaggcatttccaagcggtaggtgcttggtcagaggatctaatctacagtgatcttccattagatttttttttttttcctactgagaggaacaactcaaaagacaaggatgcctttagtttagcctaagctctgtagcctccatctatccaattaatacaggaagaaatgttctcctcctttccatccttggagctcaacagtggcagagcatttggtattgtatattttcaacctttanatagaataaa

SEQ ID NO: 1396 - DNA, 456 bp, Bos taurus
  Clone ID: 23-LIB2809-032-Q1-E1-F3
gcatcctccctaccgccaagggcgcgggatacatatggcatagctacacgtattgtttgttgttacattgagtcctgggcagaagttttgtcccaaaaattcattatgctgcaaagccgcatagccgtatcgaggaatgctcaagtattgaagccatgacaaccaaggcacgacggttttgagatttaccaacagccctgaaaatatcatcataaacacaaaagagatggtcatgagcagagttgctatagataccacactctgacctgctgctatagccagtgccatggaactagctgaataagccaccatcatcagggtaagcatcatgatgaagaaggcctccacctttggcttcagtcctaacaagaagtatgttatacaagtaaatataatacttggtaacatcctcatggggagtaaatcagataacagttttccaaagaagttagatga

SEQ ID NO: 1397 - DNA, 370 bp, Bos taurus
  Clone ID: 23-LIB2809-026-Q1-E1-F3
ccatagaagtacatttccaattcatattaatacaacttattgaaaaattattgtaacctgagaaataagtagaatgggagataaaaacccaaaaatgggagggaattaaccaaaacctatggtctctatctttggatccgaatcactttatcgattgtgacattttctggccgtacttatggagggtttatgtcatcgatttattggatgtgtgacacacaaggatatacattggtcagccgatggaccagagctccgtgctcctccagagagttgatcctccatagtcgtagtataaaaatagtgacaagttaacacaattggaacattgtttataaaaacgattaactgatcggtaaaaagtcgggtt

SEQ ID NO: 1398 - DNA, 336 bp, Bos taurus
  Clone ID: 24-LIB2809-007-Q1-E1-F7
ccatgctccctgataccatggcgcgtcgatactcggtcatgaccggggacccctcactatgatcgtcaaataagactggtcccccactggaccgaccccagtcatgacggcactgtgaccgccacaatttctacataccacacttctcgacatggtgtcatcatccccaccaatatctcccttgtggaacaaacaatttcacatatcacccataccccttcctacacttaacctctccagccacacggttatgacccatctacaccacaccatgctgtccattttttatccaccttcattaacatcttcactccacttctcccctccccacctccc

SEQ ID NO: 1399 - DNA, 387 bp, Bos taurus
  Clone ID: 24-LIB2809-026-Q1-E1-F7
tcccgggcccataggtcctcacattctccaaacggttcgaccgactcaccaatgtattagagcgatgagtaacaaaattcacaactttgacactcaccaacacgacgaccgccaccatcacgtggaccaccaaatggaggggtttcgggacagagactgcgtactgcatgggttgggtcccgcgacgggtaagacggtgggagaaaagacgcgtggtgttagtgaaaggggtctcgccctcggcggtttggttgcccgtcaactaaccccactgtggaaactcaaccaccgtccccgtggtaatgagagacaaatcgggttgcgtacatatggactccacgggtttagtcaaacggacccggccagtgtgagtcatcttcaaaatgt

SEQ ID NO: 1400 - DNA, 417 bp, Bos taurus
  Clone ID: 25-LIB2809-002-Q1-E1-G9
gacatgggcgcgggatacacatgtatagatagctttatgtttgccccatgtctagctcgtaaagttctctcgtttttgggaagcacctatgctcaccaccaggacaccactgtctcacgttgtgacatctcaatttgctgtagccatcttcgtactatgaggggagctgactgaatatcccgaagatggcagtgtagatttatgacatcattttgacacattcccgagctgctggtatcaggatctctgggaatattcaggctcggcatttcttgttatctagaatccaaaatcttcctgatgttagagacacacattacttcatctgcaacagagacgacttttaccacaagctgaatgcttcttctgtagcctatgccgaaagtagatcatgacgatgagatttgcgtttggatt

SEQ ID NO: 1401 - DNA, 361 bp, Bos taurus
  unsure (26): Clone ID: 25-LIB2809-003-Q1-E1-G1
accgcaagaccttgactgaggcttangatgtgagatgccatgaactttgctgaacagtgtctctgttcagcaaactaaccagcattccccacaacacagtctagggcagacgatagtatagaggagtgttggaagaaccttgggtccctttgtccctgtaacctcagttgtctaggcagaaacctggctttattctatttaaaggttgaaaatatacaataccaaatgctctgccactgttgagctccaaggatggaaaggaggagaacatttcttcctgtattaattggatagatggaggctacagagcttaggctaaactaaaggcatccttgtcttttgagttgttcctctcagtagg

SEQ ID NO: 1402 - DNA, 393 bp, Bos taurus
  Clone ID: 25-LIB2809-006-Q1-E1-G1
gccatggctacgggatactgactgataaaggcaatcaaaatggaaaagaacgcgaagagcacaagaatgacggctgcgcactgctcgtcgctgagcgcccgcccggggctcgtgctttccacagtgtctctgctggcgctggctggtggttcagtcctctgagagatgaagagcactggcgaatggcacacacgcggaaacgatattcacagttcagctgaaggcttgaataccggaatgcagagtcaggacctctgtaaatctgtttgaactctgaatcttttcccaccataacctggagactgtaaataactggatcacctttcattggctgtaaacactcccatgtaatatcacaaatgtgatcatttactttctctattttgggggctt

SEQ ID NO: 1403 - DNA, 337 bp, Bos taurus
  Clone ID: 25-LIB2809-009-Q1-E1-G1
ggatacccatgtaaatatagctttatgtttgacccaactctggctcctaaaattctttcttttttgggaggcagctatgctcaccaccataccaccaatgtatctctttttgaagtctcaaaatgctgtagccatcttcttactatgaggggagctgaccaatatccccaagatggcagagtagaaagatgaaagaattttgacaatttcctgagctgctggaatcagcaattctggaaataaccaacctcaagatttcttgttatctagaataagaaatcttcctgttgtgaaagaaagaaaacaattagtctgcagcagagaccagttttaccac

SEQ ID NO: 1404 - DNA, 425 bp, Bos taurus
  Clone ID: 25-LIB2809-020-Q1-E1-G9
gacacctgcaagggaaactgttttcaactcttttccacaactcataccagaacaaagcagctatcagtgcaggaaaagaaagctacagcatgtcaaacctgcaaggaaaacggttaatgtagaagagcaatgatttttcaacctcacagattttgtttttaaaaattaagctacttagtagtaaaaagtcaaaaaaaaaataggagtgtaaataaacttccatatatcagtatacacgtgtttatgagacaggaattttaaaaagacaacaaaaaaatgcttcaaggatcctagacagataggttaaataaaaactcactccacgtcaaagatataagaacaagtctgaaattcttgataggagagatcagaatggaagtgagaaactgaacggtagcaatgagcaggcattactggatgcaaca

SEQ ID NO: 1405 - DNA, 425 bp, Bos taurus
  Clone ID: 25-LIB2809-022-Q1-E1-G1
acccatgtatatataactttatgtttgacccaactctggctcctaaaattctttcttttttgggaggcagctatgctcaccaccataccaccaatgtatctctttttgaagtctcaaaatgctgtagccatcttcttactatgaggggagctgaccaatatccccaagatggcagagtagaaagatgaaagaattttgacaatttcctgagctgctggaatcagcaattctggaaataaccaacctcaagatttcttgttatctagaataagaaatcttcctgttgtgaaagaaagaaaacaattcgtctgcagcagagaccacttttaccacaaactaaatgcttcttctttatcctaagcctaaagtatatcaggacattgagatttgcttttgagttttaagactgccctgctccacagata

SEQ ID NO: 1406 - DNA, 311 bp, Bos taurus
  Clone ID: 25-LIB2809-025-Q1-E1-G1
gccatgggcccgggatacactggacccaaggacaccatccagccttgtgtagggtcatggtatagatcagatccacggaacacaattagaatagaaggataatttggttttgatcaccatttgtaaaccatgcatctgataaccggtggaattaaacctaccccacaggcatttccaaccggaaggtgcttgcacagaggttcaaaccaaaagggatcttccattaaattttttttttcccccactgaaaggaacaactcaaaagacagggatgcctttagtttaccctaagctctgtagcctccatctac

SEQ ID NO: 1407 - DNA, 392 bp, Bos taurus
  Clone ID: 25-LIB2809-027-Q1-E1-G1
gcccgggataccaaccatttagattgctacagaagaagggagaactgacatcctgtgtaagtgatcaagtcacagcagctggaattcacagcaaacagagcacatattttaaacagatttttctccaggagtcttctcataaatgtcccttggggagaagactaatagagggagacttcagaagtgttgaaaatcaacgaaggatacataggatactagttctaaaagactgacttgccaggaagcttctttatttgaacaatactgtgactatcctggacacaggaaccatgctctgagcctgagtcttccctagttttctcagtgttgtgcaaagaaaagacagttcattcacaaggaacagattacaacatgtttgaccgaaaagatat

SEQ ID NO: 1408 - DNA, 364 bp, Bos taurus
  unsure (66): Clone ID: 25-LIB2809-029-Q1-E1-G1
atgggcgcgggatacacaaggagtggcaggattgtctgcgatctttattttcttcaagagatgcanccccatccccaaactcacagaagttatgtgattcaggagcacttgtatggttcctcactcatactgataaagccaggagttaaaagaagctgattcggtgaattcccatcatgagaggagttcatgcagttgtttggcccaagggactttccctgtgtgactgtcgggcatggcacatagtcctgtgatcaaagccaacatcctgcagtcactggcttccaggagggcacagaccaggtctctcatttcagcttcataagcacccaagcttcgtgtgctttctgaacacgatgctggg

SEQ ID NO: 1409 - DNA, 52 bp, Bos taurus
  Clone ID: 25-LIB2809-026-Q1-E1-G1
acttgaaacggctccttgttctaattcccgtccaaaacgttcttcgcgacct

SEQ ID NO: 1410 - DNA, 475 bp, Bos taurus
  Clone ID: 26-LIB2809-006-Q1-E1-G9
gctcccggaagccatggccgcgcggatacttttatcaacttggattttaaacactaataatgtcttgtgagtattctgtgtgtgttgggagagggaaaaatactgattggtgtttcacattgtatgaaatttttgaaactcggagcaataatgccatgccgttgtgattttcttccactcttctcaaattccgcatttaaaacatgtttctttataggagctcacatcccattaagccttgtcagtgttgcagcggctctgatgtggggtgggatcttcactgtgttacattccattttacattcgaagtaggattgagctctgtgttttggggaacagccagggaagcttatttatccccttgtgtgttccttatctaggtaagcaaacgttccactagtcttttttactcatccatgaaattgtagaccaagggttactcagactgtctgagtcaaggttgggactgacctcc

SEQ ID NO: 1411 - DNA, 125 bp, Bos taurus
  Clone ID: 26-LIB2809-007-Q1-E1-G5
atggcccgtcgatacagcataactaatcgatgtagccatgcacccgtgcaatacgccttacactatccatgatctttctttcgacatcaaccagtgttcataaattcgtatacctccactaatcc

SEQ ID NO: 1412 - DNA, 79 bp, Bos taurus
  Clone ID: 26-LIB2809-011-Q1-E1-G5
gatacaacggaagtgactgattagtcatctgctcgatagggcatctggtaatggtttcaacgggaataggtatgacttt

SEQ ID NO: 1413 - DNA, 375 bp, Bos taurus
  Clone ID: 26-LIB2809-013-Q1-E1-G5
accctggggacatctatgatgtgaacgctctgccatgcaactctttgggctgaggaatctagcagcctgatatcaccgctcaccatctcaaaattttaatccacgtcaacccacatggctttggaatgatggattaaccatgtgtcgctgtgccttcggattgtgactctccgtgggattctgttgaatatagtccatttggggattatgctcatgaatgaaacagttcacgactactatacccctgaggagatggaggataagattccagttcgtcatcggtgcagctgcatgcatgatgggcgctgccatggcggcaatcaacaggaatcacagtcatattgatgctaccacccagttttatgtagttgggct

SEQ ID NO: 1414 - DNA, 174 bp, Bos taurus
  Clone ID: 26-LIB2809-018-Q1-E1-G5
gccatgggtccggaatacgaatccagattcttttatagacttcctggagtggctgtgtcaatggtatgtctgtttcgctagttggtagctttaggctgtccagcttttgtagtctgctggatcctgtttcgctggtcttttgatcgtgtcctgctcgcgggttgctggggcccc

SEQ ID NO: 1415 - DNA, 453 bp, Bos taurus
  Clone ID: 26-LIB2809-023-Q1-E1-G9
gccgtcggcgcgggatacataggtaggtatattattgtatttctcttatagtatttccctcttgaaagagagggggcttgaagaataggaagaattatccaggttgcctcctttcctctcgctgctggacaggagatggagaggttgaggggcagggtctgtaggcagttcctaagagatagggttacaaaagaaaggctctgagatcacattgctgggggattcagaaggttactgagtaagttgttgggtgtcctgatatagaagctggttatacaaacaagttagatgttgggttcatttcattaattccactttctccttggattgagaaagcattagaaggcttctccccacggtgttgaaccctttcactcattccttctattaccttctagcggaaaatacaggactggctgggggatggggtacgaatctctcaactaccctatc

SEQ ID NO: 1416 - DNA, 442 bp, Bos taurus
  Clone ID: 26-LIB2809-028-Q1-E1-G9
cgccatgggcccgggatacatggctacaagagaaagaggaaacctgtgtcctgctgttttagccagagagagattcaaaatgatcagggtcaaaacagtgtatgttaagttggtttgcaaacacaccacaaagaatttagggactttttttcccctgactgctactgatgtgtttctgggacacgcccaacataaatacagtcttctgccctcaacagtccctctcaaaccagatcctcagtaaacaactctgcatttgactcttgcctaaagtgggtggcttcccagtaagccttcatggggcagggcaccagctggcccagccccgggccatacgatggccactcaggctttaggtattcagctgactgaatcagtccttaggattctctcctagaccaaacttgatcctacacccttctagccaggcagattcaaaccc

SEQ ID NO: 1417 - DNA, 382 bp, Bos taurus
  Clone ID: 26-LIB2809-029-Q1-E1-G9
acaggtgcttcctgagagagatgacataggattagagttgcttccctgtttcagtccatgccctcatttgcccactgaacacttgggtttgggacatgaccttcaggtcccttcagggctccaagggctctttgcagtctaggggcacagcctgaggctgacctgggccctctcgcatctgcctggtggtcgcaggaagttgcctccacccagaagcaaagatggtcctcggtcccagacagctggataagggaagtgttgtgggtcagcactggccctcagcactcctggatgggggcagggagggtgggcaaaactttggaaagccaagcagggggtaatcctgggttccaggcaggatcttattcattggatggtcaag

SEQ ID NO: 1418 - DNA, 426 bp, Bos taurus
  Clone ID: 26-LIB2809-030-Q1-E1-G5
acccatgtatatatagctttatgtttgacccaactctggctcctaaaattctttcttttttgggaggcagctatgctcaccaccataccaccaatgtatctctttttgaagtctcaaaatgctgtagccatcttcttactatgaggggagctgaccaatatccccaagatggcagagtagaaagatgaaagaattttgacaatttcctgagctgctggaatcagcaattctggaaataaccaacctcaagatttcttgttatctagaataagaaatcttcctgttgtgaaagaaagaaaacaattcgtctgcagcagagaccacttttaccacaaactaaatgcttcttctttatcctaagcctaaagtatatcaggacattgagatttgcctttgaattttaaggactgccctgctccacagata

SEQ ID NO: 1419 - DNA, 386 bp, Bos taurus
  Clone ID: 26-LIB2809-031-Q1-E1-G9
gggatacccataaagtatgactgcagctggagagattcatagtttaattgcctactacagagtcgtcaggaaattcctggctctgtacaggtttaatgtcttgctcacagacagactcggtgaattatgattttattgtgttgccagcttcacccatggactctgtactcgtttggcaacggatgcacctgtctgtggactaatcctttgcacatctgatgcatctctagcctggataacacggggtaaactctcaagatggaatttgcagagtgcctatctttcaagtgtgttatcccagatagaaggccataggggttatgctgaactggtagcatcgatgtctggtgaataatgtctaccatgctgaatccaattatgtctca

SEQ ID NO: 1420 - DNA, 357 bp, Bos taurus
  Clone ID: 26-LIB2809-026-Q1-E1-G5
ccggcggtcgacctgcagcatcatcccacacgtgggaagcgcttccatcgatacgttcactattgtatactctgaggtacatacgttccgctcatgatcctgatacgtctttggtctctcaaattcttacggcgtgagaattggagagaagatagcacggccaacgataaactctacacggtcccctcggtaatcactcacgtaagtgagattacttcgcttcgcgtgagtcccccgtttggactccccaaaggtctgctcggacgtccaccactcaatgcccgacaggcgccccacaaccgctttcgctattcccgcgtgttggccttggtgcccgcctcagtgcgtcgcgtgcct

SEQ ID NO: 1421 - DNA, 217 bp, Bos taurus
  Clone ID: 27-LIB2809-003-Q1-E1-G11
ggggctatcctccgcttgacgcactttggatcctgcctttgcctcatgtgcctcccattttacgctatgtaccgcctgcttctgcaagcctctcactgtcagctgggagtactgtctcatggtatgcaacttatggggttgcccgggggcatccagcattctctccggttctgactcagtcatatgagatgaaatgtgaatcctcttttgccccatg

SEQ ID NO: 1422 - DNA, 111 bp, Bos taurus
  Clone ID: 27-LIB2809-008-Q1-E1-G3
accctgggaccaaagacaccatccagccttgtgtagggtcatggtataattcaattccacggaacacatttaaattaaaaaaataatttggttttaataacaatttttaaa

SEQ ID NO: 1423 - DNA, 336 bp, Bos taurus
  unsure (297): Clone ID: 27-LIB2809-009-Q1-E1-G3
gatacccatgtatatatagctttatgtttgacccaactctggctcctaaaattctttcttttttgggaggcagctatgctcaccaccataccaccaatgtatctctttttgaagtctcaaaatgctgtagccatcttcttactatgaggggagctgaccaatatccccaagatggcagagtagaaagatgaaagaattttgacaatttcctgagctactggaatcagcaattctggaaataaccaacctcaagatttcttgttatctagaataagaaatcttcctgttgtgaaaganagaaaacaattcgtctgcagcagagaccacttttaccac

SEQ ID NO: 1424 - DNA, 224 bp, Bos taurus
  Clone ID: 27-LIB2809-012-Q1-E1-G3
actgcctggggcgagacccggcagcctgtacagaccatgtttggaacaagagattgcagtagaaagatgggaacacatggctgggtttccaaggtgaatgcgctccgcatttggggtgtccaaatgtgagttttgcaaataaccttatgtagtcctctctaaagccgccatagttaaaatctattttcactccacttgtgcttaaactttactcttgcaaatta

SEQ ID NO: 1425 - DNA, 422 bp, Bos taurus
  Clone ID: 27-LIB2809-014-Q1-E1-G3
ccgcgggatactaggaggtcccctgaggctccccagtcacgtcgaagggactagcagtgtttcccatgagttcaggacagtgcttcccatgccaagtccatgggaagtaacaattttgggagtgacagttgaggctggtgctttgctagcacacttggggctgacagatgcttgctgtgtccagggctactcttccaagtctgaaacccccaagcctccacactgtgcctccagcctcctgcctccaggctggaatcttgtgcacattcatgcctgctagggacagacagaaatcctccacaaaaccagacatgtcagcatcagaaaaggctctgatggagacaggatgaacttcagaatgggcttagcctggacctcaaactaattctagtgataaattagtggaaagagaaagaagaaaa

SEQ ID NO: 1426 - DNA, 402 bp, Bos taurus
  Clone ID: 27-LIB2809-016-Q1-E1-G3
tgggcccgggatacgaaacagagctagggcaaagagcagcttttaaaaagtcatcttccaataaatatttactacagagaaatattttcctttaacattaaaacactgataagttcagaagttaatgttgtaaaaaaaatatgttcatttccccacatgtataaaaataatgtttttagggccattccctcctgggtgtggtcaggcccttcttttcgaggggagctggggtgaccttaaggcttaaaccccaaagctatacctgcctccccctttgcccacctgcctgccacagcccattccttccttctggtgtaaagctatggaagaaattttggacgaaattatgctgagaattttttgttttgctttgtttttgcagcttaccaaacttcccaaaaa

SEQ ID NO: 1427 - DNA, 274 bp, Bos taurus
  Clone ID: 27-LIB2809-027-Q1-E1-G3
cccaaaacacagtctagggcagacgatagtatagaggagtgttggaagaaccttgggtccctttgtccctgtaacctcagttgtctaggcagaaacctggctttattctatttaaaggttgaaaatatacaataccaaatgctctgccactgttgagctccaaggatggaaaggaggagaacatttcttcctgtattaattggatagatggaggctacagagcttaggctaaactaaaggcatccttgtcttttgagttgttcctctcagtagg

SEQ ID NO: 1428 - DNA, 305 bp, Bos taurus
  Clone ID: 27-LIB2809-030-Q1-E1-G11
actgtcatggatcatctccacgtagaagctgtcattgtcaaccgcgttatcagagatgatcactgcccgcccgccgtgctcctgcaccacccgggtcttggacaggaaggagcagccccccctctccaccagcgcgatctggtcctggatgaagaaaccgttgctgagttccccacaggcctctgaaggttccgcagggacaaggtgaatctgctcataccttgtgtgaaagataccaccaaagtccttggcaggcgtggctgtgaagatgtagcaaatgtccccaggactcagcacttgaaagt

SEQ ID NO: 1429 - DNA, 426 bp, Bos taurus
  Clone ID: 28-LIB2809-005-Q1-E1-G7
actggtgcttcatgagagagatgacataggattagagttgcttccctgtttcagtccatgccctcatttgcccactgaacacttgggtttgggacatgaccttcaggtcccttcagggctccaagggctctttgcagtctaggggcacagcctgaggctgacctgggccctctcgcatctgcctggtggtcgcaggaagttgcctccacccagaagcaaagatggtcctcggtcccagacagctggacaagggaagtgttgtgggtcagcactggccctcagcactcctggatgggggcagggggggtgggcaaaactttggaaagccaagcacggggtaatcctgcgttccaggcatgattctattcattggatggtcaagcagcggtggctgaagagctgggtgatgatggatgggtcgactac

SEQ ID NO: 1430 - DNA, 413 bp, Bos taurus
  Clone ID: 28-LIB2809-013-Q1-E1-G7
acccatgtaaatatagctttatgtttgacccaactctggctcctaaaattctttcttttttgggaggcagctatgctcaccaccataccaccaatgtatctctttttgaagtctcaaaatgctgtagccatcttcttactatgaggggagctgaccaatatccccaagatggcagagtagaaagatgaaagaattttgacaatttcctgagctgctggaatcagcaattctggaaataaccaacctcaagatttcttgttatctagaataagaaatcttcctgttgtgaaagaaagaaaacaattcgtctgcagcagagaccacttttaccacaaactaaatgcttcttctttatcctaagcctaaagtatatcaggacattgagatttgcttttgagttttaggactggcct

SEQ ID NO: 1431 - DNA, 419 bp, Bos taurus
  Clone ID: 28-LIB2809-018-Q1-E1-G7
actttggaaccataggtttccgctgtgagccctataataaccctgcagacttcttcctggacatcattaatggagattcttctgctgtggtgttaaatagagaagacataggtgatgaagctaacgagaccgaagagccttccaaaaaagatactccactcatagaaaaattagctgagttttatgtcaactcctccttcttcaaggaaacaaaagttgaattagataaattctcaggggatcagagaaggaagaagcttccatcctacaaggaggtcacttatgccacctccttctgtcatcagctcaaatggatttccaggcgttcattcaaaaatttactgggtaatccccaggcttctatagctcagctaattgtgacagtcttcctgggactggttataggtgccattttctat

SEQ ID NO: 1432 - DNA, 418 bp, Bos taurus
  Clone ID: 28-LIB2809-019-Q1-E1-G11
acaccctagctccctccagggggctggggccaccttctgagtgaggcactttggaacctgcctttgcttcttgtgcttcccagtgaaggctaggcaccccctgcttctgcaagcctcgcactgtccgctgggagcactgactcagggtaggcagcttatccagtaagccgggggcatccagcatgctctctggttctgacccagacagaggagactaaaaacaaatcctcttttgctccatggctggctctggcacaacaataacattcggcttggccgtgcctcatgagtgcgaatgcctgtgcccaggatgtttctagcaggctttgccagccttgtctggagtcatcagtgtggtaaggagcacaaggatatagatggagactctggaggccaagtgaaagtggcagcttgctca

SEQ ID NO: 1433 - DNA, 371 bp, Bos taurus
  Clone ID: 28-LIB2809-021-Q1-E1-G11
acatcgtattcagctgcatccttctctacgtggtgtttcagaagctttccacccggttgagggccttgaggcagaggcacttagatcaagctgccgctgctctggaacctgatattgttgttaaacgacaggaggctttagcagctgctcgtttgaaaatgcaagaagaattaaatgcacaagttgaaaagcataaagagaaattaagacagcttgaagaagaaaaaaggagacagaagatcgaaatgtgggatagcatgcaagaaggaaaaagttataaaggaaatacaagaaagcctcaggaagaggacagtcctgggccttctacttcatcagtcatcccaaaacgaaaatctgacagaaagcctttg

SEQ ID NO: 1434 - DNA, 422 bp, Bos taurus
  Clone ID: 28-LIB2809-021-Q1-E1-G7
accgcaaaaccttgactgaggcttaggatgtgagatgccatgaactttgctgaacagtgtctctgttcagcaaactaaccagcattccccacaacacagtctagggcagacgatagtatagaggagtgttggaagaaccttgggtccctttgtccctgtaacctcagttgtctaggcagaaacctggctttattctatttaaaggttgaaaatatacaataccaaatgctctgccactgttgagctccaaggatggaaaggaggagaacatttcttcctgtattaattggatagatggaggctacagagcttaggctaaactaaaggcatccttgtcttttgagttgttcctctcagtaggaaaaaaaaaaatctaatggaagatcactgtagattagatcctctgaccaagcacctaccgc

SEQ ID NO: 1435 - DNA, 415 bp, Bos taurus
  Clone ID: 28-LIB2809-022-Q1-E1-G7
actttggaaccataggtttccgctgtgagccctataataaccctgcagacttcttcctggacatcattaatggagattcttctgctgtggtgttaaatagagaagacataggtgatgaagctaacgagaccgaagagccttccaaaaaagatactccactcatagaaaaattagctgagttttatgtcaactcctccttcttcaaggaaacaaaagttgaattagataaattctcaggggatcggagaaggaagaagcttccatcctacaaggaggtcacttatgccacctccttctgtcatcagctcaaatggatttccaggcgttcattcaaaaatttactgggtaatccccaggcttctatagctcagctaattgtgacagtcttcctgggactggttataggtgccatttt

SEQ ID NO: 1436 - DNA, 400 bp, Bos taurus
  Clone ID: 28-LIB2809-023-Q1-E1-G7
ggatacaaactatcgctttttattgtatttctcttattgtctttccctcctgttgcatcggggcttgaattttctgtagtattagccacgttgcctcgtttcatctcgctgccggtcaggtcatgtctaggtttttgggcacggtcagtatgcagttcatacgatatccggttacaatagaattgctctcacatcatattgctggcggattcataatgttactgagtacgttgttcggtgtcctcatattcaagtcggttaacccgtcatgttaaatgttgggttcattccattacttccactttcgccttggtttgagtaagcattacaccgcttctccctacggtgttgactcctttcacctccaaaatttttccccccccgttttttttttcccccc

SEQ ID NO: 1437 - DNA, 396 bp, Bos taurus
  Clone ID: 28-LIB2809-024-Q1-E1-G7
acccataaatatatagctttatgtttgacccaactctggctcctaaaattctttcttttttgggaggcagctgtgctcaccaccataccaccaatgtatctctttttgaagtctcaaaatgctgtatccatcttcttactatgaggggagctgaccaatatccccaagatggcagagtagaaagatgaaagaattttgacaatttcctgagctgctggaatcagcaattctggaaataaccaacctcaagatttcttgttatctagaataagaaatcttcctgttgtgacagaaagaaaacaattcgtctgcagcagagaccacttttaccacaaactaaatgcttcatctttatcctaagcctaaagtatatcaggacattgagatttgcttttg

SEQ ID NO: 1438 - DNA, 415 bp, Bos taurus
  Clone ID: 28-LIB2809-026-Q1-E1-G11
ctccagccgccatggcccgggatacctggacccaaggacaccatccagccttgtgtagggtcatggtatagatcagatccacggaacacaattagaatagaaagataagttggttttgatcatcagttgtaaagcatgcatctgatgacctgtggaattaaaactaccccacaggcatttccaagcggtaggtgcttggtcagaggatctaatctacagtgatcttccattagatttttttttttcctactgataggaacaactcacaagacaaggatgcctttagtttagcctaagctctgtaacctccatctatccaattaatacaagaagaaatgttctcctcctttccatccctggagctcaacagtggcaaagcatttggtactgtatattttcaacctttaaatacaat

SEQ ID NO: 1439 - DNA, 140 bp, Bos taurus
  Clone ID: 28-LIB2809-027-Q1-E1-G7
ggataaggttatagagagaggatgtggggagacgactggcatgtgttgttcatagaagactctggaacaacagccagtcacacgtagtgacacgtacataccagggtcacttctcatctgcatcacatgtctgcattttt

SEQ ID NO: 1440 - DNA, 437 bp, Bos taurus
  Clone ID: 28-LIB2809-028-Q1-E1-G11
gccatgggcccgggataccctgggaccaaggacaccatccagccttgtgtagggtcatggtatagatcagatccacggaacacaattagaatagaaagataagttggttttgatcatcagttgtaaagcatgcatctgatgacctgtggaattaaaactaccccacaggcatttccaagcggtaggtgcttggtcagaggatctaatctacagtgatcttccattagattttttttttttcctactgagaggaacaactcaaaagacaaggatgcctttagtttagcctaagctctgtagcctccatctatccaattaatacaggaagaaatgttctcctcctttccatccttggagctcaacagtggcagagcatttggtattgtatattttcaacctttaaatagaataaagccaggtttctgcctagacaactg

SEQ ID NO: 1441 - DNA, 404 bp, Bos taurus
  Clone ID: 28-LIB2809-031-Q1-E1-G11
acatatgacatagctacacgtattgtttgttgttacattgagtcctgggcagaagttttgtcccaaaaattcattatgctgcaaagccgcatagccgtatcgaggaatgctcaagtattgaagccatgacaaccaaggcacgacggttttgagatttaccaacagccctgaaaatatcatcataaacacaaaagagatggtcatgagcagagttgctatagataccacactctgacctgctgctatagccagtgccatggaactagctgaataagccaccatcatcagggtaagcatcatgatgaagaaggcctccacctttggcttcagtcctaacaagaagtatgttatacaagtaaatataatacttggtaacatcctcatggggagtaaatcagataaca

SEQ ID NO: 1442 - DNA, 449 bp, Bos taurus
  unsure (120): Clone ID: 28-LIB2809-026-Q1-E1-G7
cgcatcccgcgcccataggcgaacaggttcagtcaccgttaccatctcacatcggatcaagtttcgtcaagactctgtgtcttgacgaaagtaaggacgattggggagacgagactgtanccgacagcatactacacaccactcttccaacaaggctccctgggtttctgggtctaaggtgacttctgcaccgacaaaggtcggtttattgtacttcaaccttcaaaatatagaataggaactcgcgtcggagtcttcacgcggaaccatcccaaccaccacaagatttgttggtctaccaattccatacatccaccgtagacacgttaccgtaaagtaaaccgatggttctgttttcacttcgccgtgtgactaccaaaaaaaaaaatgtaatcccacatgagtctagatcacatggtgtcaggaacgaggtacgcgttccaaatcgg

SEQ ID NO: 1443 - DNA, 433 bp, Bos taurus
  Clone ID: 29-LIB2809-001-Q1-E1-H1
gggcgccggatacacatacacatacacgcaagcctggtctctctctgatgtgagggtccttcacttgagggtcctacagtggctttagatagttggttccaaatgtctttttggagatttcctgcttgggaccaaacctccctcagataaggacaatttctcaagttcagcttcaagttcgggatctgacatcctactgttacgcacactgttgatatcatacgtcccctgggggttgtagggcagatccgaatgttccttggtggtgtcctgaaacaggatgtccaactccttctccagttccacactgtcaaagtcaatgccattggttaccccgccagccagtgtctgagaaacttcgtcctgagtgtcacaaaactcctggatctgatccacaccgttctacgactatctcactgtgacatccttcaag

SEQ ID NO: 1444 - DNA, 398 bp, Bos taurus
  unsure (147),(262),(335): unsure at all n locations; Clone ID: 29-LIB2809-002-Q1-E1-H1
actttggttggaatattaaagtaattctcttagagtatttccctctgaaagagaaggggcttgaagaagaggaagaattagccaggttgcctcctttcctctcgctgctggacaggagatggagaggttgaggggcatggtctgtangcagttcctaagagatagggttacaaaagaaaggctctgagatcacattgctgggggattcagaaggttactgagtaagttgttgggtgtcctgatatagaagctggttatacanacaagttagatgttgggttcatttcattaattccactttctccttggattgagaaagcattagaaggcttctncccacggtgttgaaccctttcactcattccttctattaccttctagcggaaaatacaggactg

SEQ ID NO: 1445 - DNA, 421 bp, Bos taurus
  Clone ID: 29-LIB2809-002-Q1-E1-H9
accccgacatccacttttctttgtatacttgataatcagaaactcggggctggcgtgggtcacggctcggagagccctgtcacttagctcagggccgcgtgccctatgctcctgggaccacgtcatcatcggtttgaccatgcccccctggcagagcctttgactgcttcttctgccctgataagcgcagcccatggattcctgtgtgtgtgcaagcatctcactgagatgacgcccagagcgcagtcaggaagaacgtgcgttttacacacaagagttgcctggtgtctggaggcaccgccacctgcagtttatgggaagctccgttcatggccagcgttccccatggataatgtgcttcttaacgcctgcaaatctgataggcagacatgcactccgcgtttgtctcatttcctggtta

SEQ ID NO: 1446 - DNA, 453 bp, Bos taurus
  Clone ID: 29-LIB2809-003-Q1-E1-H1
catgaccgcggcatagccgcatgggaagctgttttcaactcttttccaaaactcataacagaacaaagcaactaacaattcagggaaagaaaactacaacatgttcaacctgcaagggaaacggttaatgtagaagagcaatgatttttcaacctcacagattttgtttttaaaaattaagctacttagtagtaaaaagtcaaaaaaaaaaataggagtgtaaataaacttccatatatcagtatacacgtgtttatgagacaggaattttaaaaagacaacaaaaaaatgcttcaaggatcctagacagataggttaaataaaaactcactccacgtcaaagatataagaacaagtctgaaattcttgataggagagatcagaatggaagtgagaaactgaacggtagcaatgagcaggcattactggatgcaacaatccttcccaacagac

SEQ ID NO: 1447 - DNA, 172 bp, Bos taurus
  Clone ID: 29-LIB2809-007-Q1-E1-H1
ggccggggcatacagctggcataacaacattaggacgtgcttcactgattacttaggcaccatcggtccggcctatgattcgagtacattaccctaagcggcaagcatggccagcatctgcaaacctcgaaatgacagctaggagaattgccgcatgtgtggtcccttaggt

SEQ ID NO: 1448 - DNA, 373 bp, Bos taurus
  Clone ID: 29-LIB2809-023-Q1-E1-H1
tgggcccggcatacccatgaataaatagctttatgtttgacccaactctggctcctaaaattctttcttttttgggaggcagctatgctcaccaccataccaccaatgtatctctttttgaagtctcaaaatgctgtagccatcttcttactatgaggggagctgaccaatatccccaagatggcagagtagaaagatgaaagaattttgacaatttcctgagctgctgggatcagcaattctggaaataaccaacctcaagatttcttgttatctagaataagaaatcttcctgttgtgaaagaaagaaaacaattcgtctgcagcagagaccacttttaccacaaactaaatgcttcttctttatcctaag

SEQ ID NO: 1449 - DNA, 128 bp, Bos taurus
  Clone ID: 30-LIB2809-001-Q1-E1-H9
gggcgcgggataccatgagaacaggggcatgatcgacccttgtatagggtcatggccaacatcatatccacagaacacgattatactaaaatgacaacttggttttgatcatcagttgtgaaccatgc

SEQ ID NO: 1450 - DNA, 394 bp, Bos taurus
  Clone ID: 30-LIB2809-006-Q1-E1-H5
gccatgggccgaggatacacctagctccctccagggggctggggccaccttctgagtgaggcactttggaacctgcctttgcttcttgtgcttcccagtgaaggctaggcaccccctgcttctgcaagcctcgcactgtccgctgggagcactgactcagggtaggcagcttatccagtaagccgggggcatccagcatgctctctggttctgacccagacagaggagactaaaaacaaatcctcttttgctccatggctggctctggcacaacatgagcattcggcttggccgtgcctcatgagtgcgaatgcctgtgcccaggatgtttctagcaggctttgccagccttgtctggagtcatcagtgtggtaaggagcacaaggatatagat

SEQ ID NO: 1451 - DNA, 294 bp, Bos taurus
  Clone ID: 30-LIB2809-009-Q1-E1-H5
acacagctgatttttctgggaattggtttgttcctcatactggtttgccatatcctgagcttatactcatcgcggtccctgctatgttttctcgtcaccctcatgacttcagagaggtcagacttgtggtcctttctctgttactacttctggacacctcaggctacttccttcctcggaataggaatttcttgaatttctgaagactttcgcattttgaaagagtgtagcttcatatggcttagtactgggtccatttgtctgcattttaggtcgactcacagtcggtcttcc

SEQ ID NO: 1452 - DNA, 361 bp, Bos taurus
  Clone ID: 30-LIB2809-010-Q1-E1-H9
accgcaagaccttgactgaggcttaggatgtgagatgccatgaactttgctgaacagtgtctctgttcagcaaactaaccagcattccccacaacacagtctagggcagacgatagtatagaggagtgttggaagaaccttgggtccctttgtccctgtaacctcagttgtctaggcagaaacctggctttattctatttaaaggttgaaaatatacaataccaaatgctctgccactgttgagctccaaggatggaaaggaggagaacatttcttcctgtattatttggatagatggaggctacagagcttaggctaaactaaaggcatccttgtcttttgagttgttcctctcagtaag

SEQ ID NO: 1453 - DNA, 421 bp, Bos taurus
  Clone ID: 30-LIB2809-014-Q1-E1-H5
accctgggcacaaggacaccatccagccttgtgtagggtcatggtatagatcagatccacggaacacaattagaatagaaagataagttggttttgatcatcagttgtaaagcatgcatctgatgacctgtggaattaaaactaccccacaggcatttccaagcggtaggtgcttggtcagaggatctaatctacagtgatcttccattagattttttttttttcctactgagaggaacaactcaaaagacaaggatgcctttagtttagcctaagctctgtagcctccatctatccaattaatacaggaagaaatgttctcctcctttccatccttggagctcaacagtggcagagcatttggtattgtatattttcaacctttaaatagaataaagccaggtttctgcctagacaactg

SEQ ID NO: 1454 - DNA, 418 bp, Bos taurus
  Clone ID: 30-LIB2809-019-Q1-E1-H9
acaccctagctccctccagggggctggggccaccttctgagtgaggcactttggaacctgcctttgcttcttgtgcttcccagtgaaggctaggcaccccctgcttctgcaagcctcgcactgtccgctgggagcactgactcatggtaagcagcttatccagtaagccgggggcatccagcatgctctctggttctgacccagacagaggagactaaaaacaaatcctcttttgctccatggctggctctggcacaacatgagcattcggcttggccgtgcctcatgagtgcgaatgcctgtgcccaggatgtttctagcatgctttgccagccttgtctggagtcatcagtgtggtaaggagcacaaggatatagatggagactctggaggccaagtgaaagtggcagcttgctca

SEQ ID NO: 1455 - DNA, 254 bp, Bos taurus
  Clone ID: 30-LIB2809-023-Q1-E1-H5
ggacactctcattcgttccattctggcaagtcttcatgatcaccagcataccaacactgtatctcttcttggtgtcccaacgtgcagtaaccatcatcctagtatgaagggagctcatgacctataccagaatcgaacagtagagacatgctcgaagtttgacaatttcctgatctgtgtgagatgactcaatcagggaataaccaacctctagaattcttgtgatcgagataaacaccacttcatgttgtgaa

SEQ ID NO: 1456 - DNA, 441 bp, Bos taurus
  Clone ID: 30-LIB2809-023-Q1-E1-H9
gggatacataggtaggtatattattgtaattctcttgtagtatttccctctgatagagagggggcttgattaatatgaagaattatccatgttgcctcctttcctctcgctgctggacaggagatggagaggttgaggggcagggtctgtacgcagttcctaagagatagggttacaaaagaaaggctctgagatcacattgctgggggattcagaaggttactgagtaagttgttgggtgtcctgatatagaagctggttatacaaacaagttagatgttgggttcatttcattaattccactttctccttggattgagaaagcattagaaggcttctccccacggtgttgaaccctttcactcattccttctattaccttctagcggaaaatacatgactggctggaggatggggtaggaatctctcaactaccctatc

SEQ ID NO: 1457 - DNA, 405 bp, Bos taurus
  Clone ID: 30-LIB2809-028-Q1-E1-H5
gccatgggcgcgggataccgcaaaaccttgactgaggcttaggatgtgagatgccatgaactttgctgaacagtgtctctgttcagcaaactaaccagcattccccacaacacagtctagggcagacgatagtatagaggagtgttggaagaaccttgggtccctttgtccctgtaacctcagttgtctaggcagaaacctggctttattctatttaaaggttgaaaatatacaataccaaatgctctgccactgttgagctccaaggatggaaaggaggagaacatttcttcctgtattaattggatagatggaggctacagagcttaggctaaactaaaggcatccttgtcttttgagttgttcctctcagtaggaaaaaagaaaaatctaatggaagatcac

SEQ ID NO: 1458 - DNA, 463 bp, Bos taurus
  Clone ID: 30-LIB2809-029-Q1-E1-H5
catgctcatcagccatgggccgggatacaccctgactccctccagggggctggggccaccttctgagtgaggcactttggaacctgcctttgcttcttgtgcttcccagtgaaggctaggcaccccctgcttctgcaagcctcgcactgtccgctgggagcactgactcagggtaggcagcttatccagtaagccgggggcatccagcatgctctctggttctgacccagacagaggagactaaaaacaaatcctcttttgctccatggctggctctggcacaacatgagcattcggcttggccgtgcctcatgagtgcgaatgcctgtgcccaggatgtttctagcaggctttgccagccttgtctggagtcatcagtgtggtaaggagcacaaggatatagatggagactctggaggccaagtgaaagtggcagcttgctcaactttgtaaagagaaacag

SEQ ID NO: 1459 - DNA, 389 bp, Bos taurus
  Clone ID: 30-LIB2809-029-Q1-E1-H9
acaccctagctccctccagggggctggggccaccttctgagtgaggcactttggaacctgcctttgcttcttgtgcttcccagtgaaggctaggcaccccctgcttctgcaagcctcgcactgtccgctgggagcactgactcagggtaggcagcttatccagtaagccgggggcatccagcatgctctctggttctgacccagacagaggagactaaaaacaaatcctcttttgctccatggctggctctggcacaacatgagcattcggcttggccgtgcctcatgagtgcgaatgcctgtgcccaggatgtttctagcaggctttgccagccttgtctggagtcatcagtgtggtaaggagcacaaggatatagatggagactctg

SEQ ID NO: 1460 - DNA, 421 bp, Bos taurus
  Clone ID: 30-LIB2809-032-Q1-E1-H5
accgcaagaccttgactgaggcttaggatgtgagatgccatgaactttgctgaacagtgtctctgttcagcaaactaaccagcattccccacaacacagtctagggcagacgatagtatagaggagtgttggaagaaccttgggtccctttgtccctgtaacctcagttgtctaggcagaaacctggctttattctatttaaaggttgaaaatatacaataccaaatgctctgccactgttgagctccaaggatggaaaggaggagaacatttcttcctgtattaattggatagatggaggctacagagcttaggctaaactaaaggcatccttgtcttttgagttgttcctctcagtaggaaaaaaaaaatctaatggaagatcactgtagattagatcctctgaccaagcacctaccgc

SEQ ID NO: 1461 - DNA, 378 bp, Bos taurus
  Clone ID: 30-LIB2809-026-Q1-E1-H5
gcgatagtgggcaggcggatcccgcgcccatagttgaagaagaccaagatctcgctaaatgaagctcaatgacggatgtggctttcacacaatcccctctgaagagaaacggccgtgtgacttgagatcttgacattatcccgaaattatcagtgacttttggtcgtactactacctttgagtgtctcatttgattagacagcactcggatagctgttcgtgagtcaactcacgtggcgactcaagccctgagtattcatggattcgcacttgtacatggctcagagaggagtgagatatctcgggactgtcgatccactgatgactcaaagagggaacagtagagccttggtctatcccgtcgtggtccttgtggtc

SEQ ID NO: 1462 - DNA, 431 bp, Bos taurus
  Clone ID: 31-LIB2809-002-Q1-E1-H11
atggccccggcatacttctctctaaagtgcttaaaactctcagctgctatcacaggtcatctatatgatgtagggatctgttccacattgccctgcgatgtaaagggtaaaagctgaacaggctactgcctgaagtaacagcaaagggatgacttcatttaatactgtggtcagctcacacagctaactccagggaactgttctttcagaactatgagaaattcagaattcctcggttgacactttgtccaaggaactattgccccagtgtttctccaaccgacatcataaaatggagtgcgattcagaatcatcagagaagctatttaaagaccctagtccttgagacagagtcagaattaagcctagagtggatccaggcatgagtatgtttcacaggttctatagggggttctcatgaatactcctag

SEQ ID NO: 1463 - DNA, 302 bp, Bos taurus
  unsure (177): Clone ID: 31-LIB2809-009-Q1-E1-H3
actgtcccagcgcagtgttgaattattaaggtcttcggaagataaacccattttacatatgaaaaaactgaaccccagagagggtaactaccttgcctgaggtcaaagcaagtaggggagccatgctttgaaccctgtcttgaggcaccctgatgctgaagtgggggtggatctcangtctcctgcctttaagactcccaaggtgaggcaagtgtgaaggttccttggctggggcaggataggacgatagggacaaaaggtcagtatcttcctgcctgagtattgtccagccttgataccag

SEQ ID NO: 1464 - DNA, 243 bp, Bos taurus
  Clone ID: 31-LIB2809-011-Q1-E1-H11
ccatagccgccggataccgttgccagactagaaatagacagtataaatggctctgtttgggaatctgtatctacacagggaaagtcaggggaaggctcagtttggtatcccaacctgctaaagtgattgagaagctagaatggggaaggacagggtctgggagcactgccgcatcgatccccttgcccaggcttagttgaagctcacatactctccagggagaaccacgtatgttgacggtac

SEQ ID NO: 1465 - DNA, 297 bp, Bos taurus
  Clone ID: 31-LIB2809-020-Q1-E1-H11
ccatggcccccggataacctagctccctccactgggcttggggcaccttccgagttagggacttttgaaactggctttgcttcttgtgctttccagtgaaaggtaagcaccccctggttttgcaagccgcgcaatgtccgctgggagcactgactcatggtaagcagcttatccagtaagccgggggcattcagcatgctctctggttctgacccagacaaaagaaaactaaaaacaaatcctcttttgctccatggctggctctggcacaacattagcattcggcttggccgttcc

SEQ ID NO: 1466 - DNA, 60 bp, Bos taurus
  Clone ID: 31-LIB2809-022-Q1-E1-H11
cgctctggggatggggcagctgccttctggggagcaggatagacttagtactcgagaatg

SEQ ID NO: 1467 - DNA, 402 bp, Bos taurus
  Clone ID: 31-LIB2809-022-Q1-E1-H3
ggttcaagagagaggatgtggggagacgactggcaggtgttgctcatagaagactctggaacaacagccagtcagacgtagtgacacttaaatacgagggtcagttctcatctgcacacacctctgcattttttcccctgcttaaacacacacattcatacaggaggacatgttatagtggtgaacatttggttctcaaccttccgaagagcttggaagagtcctctgaattatttcctgaaatactggaattgtctcatggagaaatcttccagtgaagggaagggggagttaaaaatatccttaactatttaacttagattaatatgcctgctgaggcaaaagcaagtcactgctctctttgttcaaggatcagagaaagtggtggctacaagctctacg

SEQ ID NO: 1468 - DNA, 405 bp, Bos taurus
  Clone ID: 31-LIB2809-031-Q1-E1-H3
gccttgggcccgggatccaccctagctcccaccagggggctggggccaccttctgagtgaggcactttggaacctgcctttgcttcttgtgcttcccagtgaaggctaggcaccccctgcttctgcaagcctcgcactgtccgctgggagcactgactcagggtaggcagcttatccagtaagccgggggcatccagcatgctctctggttctgacccagacagaggagactaaaaacaaatcctcttttgctccatggctggctctggcacaacatgagcattcggcttggccgtgcctcatgagtgcgaatgcctgtgcccaggatgtttctagcaggctttgccagccttgtctggagtcatcagtgtggtaaggagcacaaggatatagatggagactctg

SEQ ID NO: 1469 - DNA, 454 bp, Bos taurus
  Clone ID: 31-LIB2809-032-Q1-E1-H3
gccaagggcgcgggatacattttaattttcagtatcagcaggtccatagtaaagttctcaagttgccaagttgatgataactttgcattcaacagaccatcatcagaaagttgaccctacccaggaaagtaatcacttcttttcaaatcatgggaaattccaatctgtaatttactttaggtctcaattaattgggttctttaaaaattcaatgagaaacttcatgaaaaagtcagccaatacatacacctaaacataatttttacagttttaagatgctagataggaacaggatttatttagtattagacattattgctcaatcatatacagaatagattctgtatctctaagtgcataaaatgtaaggttaagaacatagattactggaagccttaagcaaacaaaatattttctgatcatcactttcacaagtatgcttcagtttgttttt

SEQ ID NO: 1470 - DNA, 325 bp, Bos taurus
  unsure (222): Clone ID: 31-LIB2809-026-Q1-E1-H3
ctttgggatcacttgaccagactcgttgggatcggacctggatcccaactacgacctttcccactcagaccttaccgtcctcgcttcgtacgagaggtgcccgtcagacatcgttcgtctctgtacccgcagtgctggaagtgtcaaagggcgacgggtggagagtctcgctggaccgcggccggtggaccgtcccacgttctcgacatcgatcggtcgtanccagacagatccctgctggagaaaaggacagatctgacgatgactaaagcgtgtcatccctatatcatcacgttgacaaccgcgttacggtccaggtgaaagt

SEQ ID NO: 1471 - DNA, 405 bp, Bos taurus
  Clone ID: 32-LIB2809-006-Q1-E1-H7
accctggacccaaggacaccatccagccttgtgtagggtcatggtatagatcagatccacggaacacaattagaatagaaagataagttggttttgatcatcagttgtaaagcatgcatctgatgacctgtggaattaaaactaccccacaggcatttccaagcggtaggtgcttggtcagaggatctaatctacagtgatcttccattagattttttttttttcctactgagaggaacaactcaaaagacaaggatgcctttagtttagcctaagctctgtagcctccatctatccaattaatacaggaagaaatgttctcctcctttccatccttggagctcaacagtggcagagcatttggtattgtatattttcaacctttaaatagaataaagccaggtt

SEQ ID NO: 1472 - DNA, 347 bp, Bos taurus
  Clone ID: 32-LIB2809-008-Q1-E1-H7
gccatcggcccgggatacaccatgactccctccagggggctggggccaccttctgagtgagacactttggaacctgcctttgcttcttgtgcttcccagtgaaagctaggcaccccctgcttctgcaagcctcgcactgtccgctgcgagcactgacgcagggtaggcagcttatccagtaagcgtggggcatccagcatgctctctggttctgaggcagaggggagggagactaagaagagggcggcgggggggcgatggctggctctggcacagcatgagcattcggcgtggcgctgcctcatgagtgcgaatgcctgtgcccaagatgtttctagcaggctttg

SEQ ID NO: 1473 - DNA, 407 bp, Bos taurus
  Clone ID: 32-LIB2809-014-Q1-E1-H7
actttggttggaatattaaagtaattctcttagagtatttccctctgaaagagagggggcttgaagaagaggaagaattagccaggttgcctcctttcctctcgctgctggacaggagatggagaggttgaggggcagggtctgtaggcagttcctaagagatagggttacaaaagaaaggctctgagatcacattgctgggggattcagaaggttactgagtaagttgttgggtgtcctgatatagaagctggttatacaaacaagttagatgttgggttcatttcattaattccactttctccttggattgagaaagcattagaaggcttctccccacggtgttgaaccctttcaatcaatccttccaataacttccaaccgaaaatacaggactggcttgggga

SEQ ID NO: 1474 - DNA, 84 bp, Bos taurus
  Clone ID: 32-LIB2809-021-Q1-E1-H7
gccatgggcccggaataccactaatgggtgcgctgtgcctcctcgttcactacagtacaagatcgcctctacacgcgaaactat

SEQ ID NO: 1475 - DNA, 400 bp, Bos taurus
  unsure (298),(361): unsure at all n locations; Clone ID: 32-LIB2809-023-Q1-E1-H7
actgccgaatggatgaggggaaacgtgcaagagaacggtgagaagggggggtggtccccctgcttgccagaaactataaacagcaaaataaacacagagaatcacaaacagggtccttcctcatgtctccgtccatccattcctccagaatgagtcccagtgtggtccctagaggtgccagggcatctggaagttctgggctgggagtggggtgcagtgtgtggcttcgaagttattcagatgcttctgagccagaaacaaagccagctgccgtcttccgtctgcactcatgtcctcncccacgctccaggggaattcaggcccatgttctgcctggtaggagcggaggacggacaggcancccccaaagggttttccccccccctttttccccccccca

SEQ ID NO: 1476 - DNA, 399 bp, Bos taurus
  Clone ID: 32-LIB2809-027-Q1-E1-H7
gggatactttggagccataggtttccgctgtgagccctataataaccctgcagacttcttcctggacatcattaatggagattcttctgctgtggtgttaaatagagaagacataggtgatgaagctaacgagaccgaagagccttccaaaaaagatactccactcatagaaaaattagctgagttttatgtcaactcctccttcttcaaggaaacaaaagttgaattagataaattctcaggggatcagagaaggaagaagcttccatcctacaaggaggtcacttatgccacctccttctgtcatcagctcaaatggatttccaggcgttcattcaaaaatttactgggtaatccccaggcttctatagctcagctaattgtgacagtcttcctggg

SEQ ID NO: 1477 - DNA, 400 bp, Bos taurus
  Clone ID: 32-LIB2809-031-Q1-E1-H11
accctgagcccaaggacaccatccagccttgtgtagggtcatggtatagatcagatccacggaacacaattagaatagaaagataagttggttttgatcatcagttgtaaagcatgcatctgatgacctgtggaattaaaactaccccacaggcatttccaagcggtaggtgcttggccagaggatctaatctacagtgatcttccattagatttttttttttttcctactgagaggaacaactcaaaagacaaggatgcctttagtttagcctaagctctgtagcctccatctatccaattaatacaggaagaaatgttctcctcctttccatccttggagctcaacagtggcagagcatttggtattgtatattttcaacctttaaatagaataaagc

SEQ ID NO: 1478 - DNA, 94 bp, Bos taurus
  Clone ID: 32-LIB2809-026-Q1-E1-H7
cgggcccataatggttaaggatccggcggacgcagacgtgggtcgtccagcgggaaactcggggggtcaaactctatctccaccacgtcaacgg

SEQ ID NO: 1479 - DNA, 421 bp, Bos taurus
  unsure (26),(73),(147),(175),(360): unsure at all n locations; Clone ID: 33-LIB2809-002-Q1-E1-A10
accgcaagaccttgactgaggcttangatgtgagatgccatgaactttgctgaacagtgtctctgttcagcanactaaccagcattccccacaacacagtctaaggcagacgatagtatagaggagtgttggaagaaccttgggtcnctttgtccctgtaacctcagttgtctangcagaaacctggctttattctatttaaaggttgaaaatatacaataccaaatgctctgccactgttgagctccaaggatggaaaggaggagaacatttcttcctgtattaattggatagatggaggctacagagcttaggctaaactaaaggcatccttgtcttttgagttgttcctctcagtangaaaaaaaaaaatctaatggaagatcactgtagattagattctctgaccaagcacctaccg

SEQ ID NO: 1480 - DNA, 417 bp, Bos taurus
  Clone ID: 33-LIB2809-003-Q1-E1-A10
atggccagggcatactcgaaccaggagatgggacatgtttgtgtccaatttctcagacttccattactttggataaacattcttcaagtatactatacagcagacattttaatcttgtcatggaaatgccctgaaagagttttaaaatgaccataattaccaataccagtccttaagataattttgctgaataaagaagtagagggggtgggggaccatttctgctttttctgccacatagattgacgggagcttgttcaaacagtgccttatcatgcttgaacacaaggtagtcaccctcagttcttctattgctggattttaccatctttagctgtgcattaaacaacaacaacaccttttccaacccccttcatgcccttggcaggcataaccttcaagaatcctccccttttt

SEQ ID NO: 1481 - DNA, 455 bp, Bos taurus
  unsure (415): Clone ID: 33-LIB2809-005-Q1-E1-A2
actttggttggaatattaaagtaattctcttagagtatttccctctgaaagagagggggcttgaagaagaggaagaattagccaggttgcctcctttcctctcgctgctggacaggagatggagaggttgaggggcagggtctgtaggcagttcctaagagatagggttacaaaagaaaggctctgagatcacattgctgggggattcagaaggttactgagtaagttgttgggtgtcctgatatagaagctggttatacaaacaagttagatgttgggttcatttcattaattccactttctccttggattgagaaagcattagaaggcttctccccacggtgttgaaccctttcactcattccttctattaccttctagcggaaaatacaggactggctgggggatggggtangaatctctcaactaccctatcaattcttggctctgccatc

SEQ ID NO: 1482 - DNA, 387 bp, Bos taurus
  Clone ID: 33-LIB2809-008-Q1-E1-A2
ctccgaccgacatggcggcgggataccctgggcaccaaggacaccatccagccttgtgtagggtcatggtatagatcagatccacggaacacaattagaatagaaagataagttggttttgatcatcagttgtaaagcatgcatctgatgacctgtggaattaaaactaccccagaggcatgtccgggcggtaggtgggtggtcagaggatctaatctacagtgatcgtccatgagagggtttttttcgtagcgacaggaaggaccgactcgacagagaaggctgcctttaatccaacgcaaggtcggtaccctccatccaaccaattcaggcaggaatatacgttcccctcctatccatgcatggaacccatcagtggccaatcac

SEQ ID NO: 1483 - DNA, 439 bp, Bos taurus
  Clone ID: 33-LIB2809-011-Q1-E1-A2
ccgaccgcatggcggcgggatcaccctgggcccaaggacaccatccagccttgtgtagggtcatggtatagatcagatccacggaacacaattagaatagaaagataagttggttttgatcatcagttgtaaagcatgcatctgatgacctgtggaattaaaactaccccacaggcatctccaagcggtaagtgcttggtcagaggatctaatctacagtgatcttccactagattttttttttcctactgagaggaacaactcaaaagacaatgatgcctttagtttagcctaaactctgtagcctccatctatccaattaatacaggaagaaatgttctcctcctttcgatccttggagctcagcagtggcagaacatttggtactgtacattttcaaccttgaaatagtaataagccaggtttctgcctagacaac

SEQ ID NO: 1484 - DNA, 389 bp, Bos taurus
  Clone ID: 33-LIB2809-013-Q1-E1-A10
attataaaaattttttcaaaaataatcctaaggtcaaaattaataataatccaaattaaaaaggaaaaattcccaccaatttaaggaaaaggtatcctggtttagttttcaaaggaattaatttaagcaattctcaaaattttgtcgggctaattttccacctttatctgatgcaattattccatctctcagagagaaacatatagattcctgacggcatccaggacacgttgctcgtggtggacacacttcatggtggatactgctactataaaaatactcagaacttaagagaattccaagatgctttataaaaagcattagtcatgcctcaaaactgccctttgaagtaagtcagtattattatcccatttttaacagaggaaaac

SEQ ID NO: 1485 - DNA, 440 bp, Bos taurus
  Clone ID: 33-LIB2809-014-Q1-E1-A2
ccggataccgcaagacacttgactgacgcttaggatgtaaaatgccatgaactttgctgaaaattgtcccggttaagcaacctaaccacaattcccaacaacaaagtctagggcagactatagtatagacgagtgttggaagaacccttgggtcactttgtccctgtaacctcagttgtctaggcagaaacctggctttattctatttaaaggttgaaaatatacaataccaaatgctctgccactgttgagctccaaggatggaaaggaggagaacatttcttcctgtattaattggatacatggaggctacagagcttaggctaaactaaaggcatccttgtcttttgagttgttcctctcagtaggaaaaaaaaaaatctaatggaagatcactgtagattagatcctctgaccaagcacctaccgcttggaaatgc

SEQ ID NO: 1486 - DNA, 388 bp, Bos taurus
  Clone ID: 33-LIB2809-017-Q1-E1-A2
gatcaacctgactccctccagggggctggggccaccttctgagtgaggcactttggaacctgcctttgcttcttgtgcttcccagtgaaggctaggcaccccctgcttctgcaagcctcgcactgtccgctgggagcactgactcagggtaggcagcttatccagtaagccgggggcatccagcatgctctctggttctgacccagacagaggagactaaaaacaaatcctcttttgctccatggctggctctggcacaacatgagcattcggcttggccgtgcctcatgagtgcgaatgcctgtgcccaggatgtttctagcaggctttgccagccttgtctggagtcatcagtgtggtaaggagcacaaggatatagatggagact

SEQ ID NO: 1487 - DNA, 379 bp, Bos taurus
  Clone ID: 33-LIB2809-020-Q1-E1-A2
cgccatgggcccgggacaccgcaaaaccttgactgaggcttaggatgtgagatgccatgaactttgctgaacagtgtctctgttcagcaaactaaccagcattccccacaacacagtctagggcagacgatagtatagaggagtgttggaagaaccttgggtccctttgtccctgtaacctcagttgtctaggcagaaacctggctttagtcgatttaaaggttgaaaatatacaataccaaatgctctgccactgttgagctccaaggatggaaaggaggagaacatttcttcctgtattaattggatagatggaggctacagagcttaggctaaagcaaaggcatccttgtccttttgagttgttcctctcagtagg

SEQ ID NO: 1488 - DNA, 441 bp, Bos taurus
  Clone ID: 33-LIB2809-025-Q1-E1-A2
gccatgggcgcgggatacacatgtatatatagctttatgtttgacccaactctggctcctaaaattctttcttttttgggaggcagctatgctcaccaccataccaccaatgtatctctttttgaagtctcaaaatgctgtagccatcttcttactatgaggggagctgaccaatatccccaagatggcagagtagaaagatgaaagaattttgacaatttcctgagctgctggaatcagcaattctggaaataaccaacctcaagatttcttgttatctagaataagaaatcttcctgttgtgaaagaaagaaaacaattcgtctgcagcagagaccacttttaccacaaactaaatgcttcctctttatcctaagcctaaagtatatcaggacattgagatttgcttttgagttttaggactgccctgctccacagata

SEQ ID NO: 1489 - DNA, 446 bp, Bos taurus
  Clone ID: 34-LIB2809-006-Q1-E1-A10
acactatagtaaacactgctgtgaacaaacttagatagtccctgatattcaaatatcactactgtttgagaccaagtgttctttaaatcagcttttctaagaattgctgtaatggagaaaaaaacgattgcctggtaagctaaattcagggaataccaggttccacaaaaatcaacaggtttctttcctgcaaggctaaagcttttcataagttcatgtgaagtatgattccctggaaaggactattatatgtaatacttgccaactctaccagcaaaccccattttgcagatagcatctctcaaaggaggggaacatactcctttggagaaatgctgccttaagagaccaggaaaacagggctacattctcataaaatcatttcaatgtcttctgttaatagtaaaacaatttaatgaaacattttacaactacatttcagttca

SEQ ID NO: 1490 - DNA, 388 bp, Bos taurus
  Clone ID: 34-LIB2809-006-Q1-E1-A6
acaccctggctccctccagggggctggggccaccttctgagtgaggcactttggaacctgcctttgcttcttgtgcttcccagtgaaggctaggcaccccctgcttctgcaagcctcgcactgtccgctgggagcactgactcagggtaggcagcttatccagtaagccgggggcatccagcatgctctctggttctgacccagacagaggagactaaaaacaaatcctcttttgctccatggctggctctggcacaacatgagcattcggcttggccgtgcctcatgagtgcgaatgcctgtgcccaggatgtttctagcaggctttgccagccttgtctggagtcatcagtgtggtaaggagcacaaggatatagatggaaactct

SEQ ID NO: 1491 - DNA, 345 bp, Bos taurus
  Clone ID: 34-LIB2809-008-Q1-E1-A6
gccatgcgggccgggatacccatgtagatatagctttatgtttgatccaactctggctcctaaaattctttcttttttgggaggcagctatgctcaccaccatacaaacaatgtatctcttttttaagtctcagagtgctgtatccatgttcttaatatgaggggagctgaccagtatccccaagagtgcagagtctaaagatgaaggaattttgactatttcctgagctgcttgaatcagcagttctggatatgtgcaacctctagatttcgtgtcatctagaataaaaaggcgtgctgttctcaaagaaataaatcacttcatctccatctcaaaccattttt

SEQ ID NO: 1492 - DNA, 430 bp, Bos taurus
  Clone ID: 34-LIB2809-009-Q1-E1-A10
cgcgacgggcccgggataccctggacccaaggacaccatccagccttgtgtagggtcatggtatagatcagatccacggaacacaattagaatagaaagataagttggttttgatcatcagttgtaaagcatgcatctgatgacctgtggaattaaaactaccccacaggcatttccaagcggtaggtgcttggtcagaggatctaatctacagtgatcttccattagatttttttttcctactgagaggaacaactcaaaagacaaggatgcctttagtttagcctaagctctgtagcctccatctatccaattaatacaggaagaaatgttctcctcctttccatccttggagctcaacagtggcagagcatttggtattgtatattttcaacctttaaatagaataaagccaggtttctgcctagac

SEQ ID NO: 1493 - DNA, 389 bp, Bos taurus
  Clone ID: 34-LIB2809-010-Q1-E1-A6
gccatgggcgcgggatacccatgtaaatatagctttatgtttgacccaactctggctcctaaaattctttcttttttgggaggcagctatgctcaccaccataccaccaatgtatctctttttgaagtctcaaaatgctgtagccatcttcttactatgaggggagctgaccaatatccccaagatggcagagtagaaagatgaaagaattttgacaatttcctgagctgctggaatcagcaattctggaaataaccaacctcaagatttcttgttatctagaataagaaatcttcctgttgtgaaagaaagaaaacaattcgtctgcagcagaggccacttttaccacaaactaaatgcttcttctttatcctaagcctaaagtatat

SEQ ID NO: 1494 - DNA, 439 bp, Bos taurus
  Clone ID: 34-LIB2809-012-Q1-E1-A6
accttctcaagtaatactcttttactttttatggcctataaatttcttgtggtagttgcctttctgtaacgaagaaaatgctacgtaacctccacatatcgtaagagaaaatcatttgtttatggttttaagatttacaaggcttaatgtgtgacggttatttccaagtgaatttctctcacacatttctggttattttcctattcattagactttgattagatttgttttaaggtataccaattagcatgacagtcacatttctctaatgttgccaaagaattgttgatgggtttgagaagccctgggactgtgtgtgggagtgagttttgtttagattttaatcaatgctagaaatagaattttaggttcgagttattcgcatttattatcttgtcttaaagcgacagctctttaaaacctttggaatactgataca

SEQ ID NO: 1495 - DNA, 441 bp, Bos taurus
  Clone ID: 34-LIB2809-014-Q1-E1-A10
actttggcgccataggtttccactgtgagccctataataaccctgcagacttcttcctggacatcattaatggagattcttctgctgtggtgttaaatagagaagacataggtgatgaagctaacgagaccgaagagccttccaaaaaagatactccactcatagaagaattagctgagttttatgtcaactcctccttcttcaaggaaacaaaagttgaattagataaattctcaggggatcagagaaggaagaagcttccatcctgcaaggaggtcacttatgccacctccttctgtcatcagctcaaatggatttccaggcgttcattcaaaaatttactgggtaatccccaggcttctatagctcagctaattgtgacagtcttcctgggactggttatacgtgccattttctatgatctaaaaaatgatcctgcag

SEQ ID NO: 1496 - DNA, 422 bp, Bos taurus
  Clone ID: 34-LIB2809-019-Q1-E1-A6
acacttatctttattatgatccagctcaggcttctctcttttacaaaagacctgcttcaaccaagagcagctgctcccatacagtccaacgcagcccaattcaggggaaatggtgtaattgtctgggatttggagaagatttggtgtggcctttttcccttctcggtgctcctcatatcccctggcagggttttcgtaagagagcagtcgtgtccctgagctggcaggtggaggatgagtgtgggaattggggaacatttgagggagatggttcatctctgccacaagagccttgggtgcttcttaacccagctaatttaaaaaccaaatcggcatatgttctggctaaagcctagtgctgataaaaatcacccctgctgaatcctccgaaattaagatacgccggttctgagtcccctcca

SEQ ID NO: 1497 - DNA, 410 bp, Bos taurus
  Clone ID: 34-LIB2809-024-Q1-E1-A6
accgcaagaccttgactgaggcttaggatgtgagatgccatgaactttgctgaacagtgtctctgttcagcaaactaaccagcattccccacaacacagtctagggcagacgatagtatagaggagtgttggaagaaccttgggtccctttgtccctgtaacctcagttgtctaggcagaaacctggctttattctatttaaaggttgaaaatatacaataccaaatgctctgccactgttgagctccaaggatggaaaggaggagaacatttcttcctgtattaattggatagatggaggctacagagcttaggctaaactaaaggcatccttgtcttttgagttgttcctctcagtaggaaaaaaaaaaatctaatggaagatcactgtagattagatcctctgacca

SEQ ID NO: 1498 - DNA, 398 bp, Bos taurus
  Clone ID: 34-LIB2809-027-Q1-E1-A6
gggatacattggagccataggtttccgctgtgagccctataataaccctgcagacttcttcctggacatcattaatggagattcttctgctgtggtgttaaatagagaagacataggtgatgaagctaacgagaccgaagagccttccaaaaagatactccactcatagaaaaattagctgagttttatgtcaactcctccttcttcaaggaaacaaaagttgaattagataaattctcaggggatcagagaaggaagaagcttccatcctacaaggaggtcacttatgccacctccttctgtcatcagctcaaatggatttccaggcgttcattcaaaaatttactgggtaatccccaggcttctatagctcagctaattgtgacagtcttcctggg

SEQ ID NO: 1499 - DNA, 405 bp, Bos taurus
  Clone ID: 34-LIB2809-028-Q1-E1-A6
gggataacgcaaaaccttgactgaggcttaggatgtgagatgccatgaactttgctgaacagtgtctccgttcagcaaactaaccagcattccccacaacacagtctagggcagacgatagtatagaggagtgttggaagaaccttgggtccctttgtccctgtaacctcagttctctaggcagaaacctggctttagtcgagttaaaggttgaaaatatacaataccaaatgctctgccactgttgagctccaaggatggaaaggaggagaacatttcttcctgtattaattggatagatggaggctacagagcttaggctaaactaaaggcatccttgtcttttgagttgttcctctcagtaggaacagtaaaaatctaatggaagatcactgtagattagat

SEQ ID NO: 1500 - DNA, 445 bp, Bos taurus
  Clone ID: 34-LIB2809-026-Q1-E1-A6
gcggatcccgcgcccatagaagacaaaccggtcaatcccgatatgtgtgtccccatacccgagtcgtttgtccccaagaacgatcagtttccagtcataaacccagacgagccagtcaccaccaaagatcagacttccagcaatatcgtcctcaccgtcctcgatggatcagtccacgataccgacaccaacctcgacattttgaagatgactcacactgatcgtgtccgtttgactaaacccgtgaagtccatatttacccaagccgatttgtttctcgttaccacggatacggtggttgagtttccacagtgggattagttgaacgtcaaccaaatcgtccaggacgagagccctttcactagcaccagccatcttttctcccatcgtcttacccatcccgggaatcaagccatagagtacacagtctctgtcccgaaacccc

SEQ ID NO: 1501 - DNA, 431 bp, Bos taurus
  unsure (358): Clone ID: 35-LIB2809-010-Q1-E1-A4
gggatacttcctcaggaaacatggcgattgcacacattggtaagcctcctggtcccagggtaggagagatgtctaagaatgccacattgtgcctttctgaatgggcttccagaacacccgggcagatgcggcgatgggcacgagaccaaccaagtagagactgggaccctgagacccaatctcacgttggaaacgtatcctctcttaagtctctactggaagcattttaggaaaacctgatttttggcggcagcagttgaggaacagctcccctgcccagcgcaccgatcacagaagtgtcctcccgtcggttttccgctgtgcaacgtcaaggtcctatccagggaggacgaaggangagcgtggagtctcttcaagaggtcgtttgctaagatcataggaagaaatataaaatctgttctttgcagcag

SEQ ID NO: 1502 - DNA, 312 bp, Bos taurus
  unsure (181): Clone ID: 35-LIB2809-012-Q1-E1-A4
ccatagcggccggagacctgtgtgaggtcaaaagactgggcttcgataagactatgtcagtctctctgcttgtctttccagggacctctcttcagccagcaacctctcctcctgcaaggatctcccagccaggcacacgattggactccacctcagcagatgacacgacttttgtccccancagcagctccaagtcgcaggtgtccatcccactgatccggatcctggcaccagtcctgctgcgtgctaacgctgcggctggccacaggcctggccgccctcgggaactacatgtttcaacggagagaaaaa

SEQ ID NO: 1503 - DNA, 443 bp, Bos taurus
  unsure (164): Clone ID: 35-LIB2809-018-Q1-E1-A4
ccatggtagcgggatagacctgactccctccaaggggctggggccaccttctgagtgaggcactttggaacctgcctttgcttcttgtgcttcccagtgaaggctaggcaccccctgcttctgcaagcctcgcactgtccgctgggagcactgactcagggtangcagcttatccagtaagccgggggcatccggcatgctctctggttctgacccagacagaggagactaaaaacaaatcctcttttgctccatggctggctctggcacaacatgagcattcggcttggccgtgcctcatgagtgcgaatgcctgtgcccaggatgtttctagcaggctttgccagccttgtctggagtcatcagtgtggtaaggagcacaaggatatagatggagactctggaggccaagtgaaagtggcagcttgctcaactttgtaaag

SEQ ID NO: 1504 - DNA, 433 bp, Bos taurus
  Clone ID: 36-LIB2809-001-Q1-E1-A12
acccatgtatatatagctttatgtttgacccaactctggctcctaaaattctttcttttttgggaggcagctatgctcaccaccataccaccaatgtatctctttttgaagtctcaaaatgctgtagccatcttcttactatgaggggagctgaccaatatccccaagatggcagagtagaaagatgaaagaattttgacaatttcctgagctgctggaatcagcaattctggaaataaccaacctcaagatttcttgttatctagaataagaaatcttcctgttgtgaaagaaagaaaacaattcgtctgcagcagagaacacttttaccacaaactaaatgcttcatctttatcctaagcctaaagtatatcaggacattgagatttgcttttgagttttaggactgccctgctccacagatatttcccag

SEQ ID NO: 1505 - DNA, 465 bp, Bos taurus
  unsure (360): Clone ID: 36-LIB2809-004-Q1-E1-A12
ggaaaccatggccgcggcgatacatatggcataactacacgtattgtttgttgttacattgagtcctgggcagaagttttgtcccaaaaattcattatgctgcaaagccgcatagtcgtatcgaggaatgctcaagtattgaagccatgacaaccaaggcacgacggttttgagatttaccaacagccctgaaaatatcatcataaacacaaaagagatggtcatgagcagagttgctatagataccacactctgacctgctgctatagccagtgccatggaactagctgaataagccaccatcatcagggtaagcatcatgatgaagaaggcctccacctttggcttcagtcctaacangaagtatgttatacaagtaaatataatacttggtaacatcctcatggggagtaaatcagaaacagttttccaaagaagtaagatgacactctatagtatccactg

SEQ ID NO: 1506 - DNA, 280 bp, Bos taurus
  Clone ID: 36-LIB2809-004-Q1-E1-A8
gatacccagggtcattttgcacctggaacaaacggagtggcctccaagtgtcacaccacttctcatttcttcatcccagtgaaaccactgtcttgagtcgactctgcgggatgatcacagactacattcgcatcacggagttcattgaacagtatacgcgccatatgcagcagcatgatcaccatccatctcagcagggccaatgtaggtcacatggaatctacctcagggccttctgtacggagctggattcagttttgcagccttaccgggaggcact

SEQ ID NO: 1507 - DNA, 451 bp, Bos taurus
  Clone ID: 36-LIB2809-005-Q1-E1-A8
acccatgtatatatagctttatgtttgacccaactctggctcctaaaattctttcttttttgggaggcagctatgctcaccaccataccaccaatgtatctctttttgaagtctcaaaatgctgtagccatcttcttactatgaggggagctgaccaatatccccaagatggcagagtagaaagatgaaagaattttgacaatttcctgagctgctggaatcagcaattctggaaataaccaacctcaagatttcttgttatctagaataagaaatcttcctgttgtgaaagaaagaaaacaattcgtctgcagcagagaccacttttaccacaaactaaatgcttcttctttatcctaagcctaaagtatatcaggacattgagatttgcttttgagttttaggactgccctgctccacagatatttcccagagtcaggagagaaaggga

SEQ ID NO: 1508 - DNA, 456 bp, Bos taurus
  Clone ID: 36-LIB2809-007-Q1-E1-A8
catactttgattaaacagcccacagcagttccaggtctcaccattcaggcctactcagagatttgatcactcaacatgcataacttgaattcaatagacttttattgttggttagaaaacagatgttttttagattattaatattttatcaacttaatttgagtgagaattgaaaactgattcaagtaagtttgaatatcacaatatgagctttctaattccataaaaatacttagtttttacagtttataatgtgacattacccccagcaccatttttgaacagcaactttccagacatttgaagcactttttaacaacatgaaactataaataccaaccatatttaaaagctcatcatgttaaattttttatgtaattttttggaactagtttttaaattttagattatatgtccacttatctttagtaagcagttaataataagcttttatga

SEQ ID NO: 1509 - DNA, 376 bp, Bos taurus
  Clone ID: 36-LIB2809-008-Q1-E1-A8
acctctttaacaagctctgcccctgctccttcccctcactgacatagcccctcttccctgaagctatgaacatgtgagatacttgtagacacgcaagcacctggcaagtttgctttcaagagcctgctaatgaatgaggaaagtcagtccaggccaggtgtcagagcccccaccatgagaaaaagaggaatacaaaggactgagagtgttaaacaaggcaaagctcttcattttctccaaaactagtcaggcctggagactacgtgatttgtttgaagacagaaccagcagagctgcagggtgactggaagccatcgccagagggaagaacacaagcttcaagggcaaatgcccaactgagctctcagaacagccc

SEQ ID NO: 1510 - DNA, 411 bp, Bos taurus
  Clone ID: 36-LIB2809-009-Q1-E1-A12
actattaatctttagacacagaagggaagggatgaagtaaagagaggggacctcagatttcctgtattcttggattatccttcctttctgaggggctcagatgtctgtgtgcatctgtcaaaatgccagctctacctgaagattgaagagatggttggtagctgctgacatggtccctcgacactattaaaagtttctgtcgcacaaacagaagtagcttgatttctgcactttagtccttttaaaaacctaagtcgaatttgattgtaagtaatctaaaatgtttaaagtaaaagaaaatatatattctagcttcctaagaagaaacagattacacgttttgacttcaatggcaaataaatacacttgaaagccaggcaagtttctctcctgccagggagtcagactatg

SEQ ID NO: 1511 - DNA, 410 bp, Bos taurus
  Clone ID: 36-LIB2809-017-Q1-E1-A8
gggcccgggatacatatggaatagctacacgtattgtttgttgttacattgagtcctgggcagaagttttgtcccaaaaattcattatgctgcaaagccgcatagccgtatcgaggaatgctcaagtattgaagccatgacaaccaaggcacgacggttttgagatttaccaacagccctgaaaatatcatcataaacacaaaagagatggtcatgagcagagttgctatagataccacactctgacctgctgctatagccagtgccatggaactagctgaataagccaccatcatcagggtaagcatcatgatgaagaaggcctccacctttggcttcagtcctaacaagaagtatgttatacaagttaatataatacttggtaacatcctcatggggagtaaatcaga

SEQ ID NO: 1512 - DNA, 292 bp, Bos taurus
  Clone ID: 36-LIB2809-028-Q1-E1-A8
gcgctgcgcctgctccctcccgggacagagctctcccctctgcgcagaaggtatgaatatgtgcgatacttggcaacacacaagcagctgacgagtttgctttcaggagcgtgcgagtgaatgaggatggtgcatccaggccaggtgtcagagccgcggacagtagagattgacgactactgcggactgagagtcttagacaaggcaaagcacttcttttgcgccaaaagtactcaggccaggagacgacctgcttcgtttgaagacataaggagcagagccgcagggtgac

SEQ ID NO: 1513 - DNA, 429 bp, Bos taurus
  Clone ID: 36-LIB2809-032-Q1-E1-A8
ctccccaccgccatgggcccgggatacaccctgactccctccaatgggctggggccaccttccgagtgaggcactttggaacctgcctttgcttcttgtgcttcccaatgaaagctaagcaccccctgcttcagcaagcctcgcactgtccgctgggagcactgactcatggtacgcagcttatctagtaagccgggggcatccagcatgctctctggttctgacacatacataggatactaaaaacaaatcctcttttgctccatggctggctctggcacaacatgagcatacggcttggccgtgcctcatgagtgcgaatgcctgtgcccaggatgtttctagcaggctttgccagccttgtctggagtcatcactgtggtaaggagcacaacgatatatatggatactctggaggccaagtgaaag

SEQ ID NO: 1514 - DNA, 442 bp, Bos taurus
  Clone ID: 36-LIB2809-026-Q1-E1-A8
ccccggcccatataagtacacgccggcggtcgagctgcacgacatcccatacgtgggaagcgcttccatcgatacgttcactattgtatactctgaggtaaatccgctcgcctaatgatcctgatacgtctttggtctctcaaattcttctggcgtgagaattggagagaagatagcacggccaacgataaactctaaacggtcccctcgctaatcactcacgtaagtgagattaattcgcttcgcgcgagtcccgcgtttgcaccgcccaaaggtctgctcggacgtcgattaatcaatgcccgaagcgcgccccacaccgcctttcgctattcccgcgtgttggcgctggtgcgccagtcagtgcgtcgcgtgcctgcttgccgtccccgcacgcctatgacgcgagtgaaaccgcctaatagccctatggagacaatga

SEQ ID NO: 1515 - DNA, 330 bp, Bos taurus
  Clone ID: 37-LIB2809-003-Q1-E1-B10
tggccaggggatacacgctggctcactccagggggctggggccaccttctgagtgaggcactttggaacctgcctttgcttcttgtgcttcccagtgaaggctaggcaccccctgcttctgcaagcctcgcactgtccgctgggagcactgactcagggtaggcagcttatccagtaagccgggggcatccagcatgctctctggttctgacccagacagaggagactaaaaacaaatcctcttttgctccatggctggctctggcacaacatgagcattcggcttggccgtgcctcatgagtgcgaatgcctgtgcccacgatgtttct

SEQ ID NO: 1516 - DNA, 400 bp, Bos taurus
  unsure (107),(164): unsure at all n locations; Clone ID: 37-LIB2809-003-Q1-E1-B2
catgaccgcgggatagaccctggctcactccaaggggctggggccaccttctgagtgaggcactttggaacctgcctttgcttcttgtgcttcccagtgaaggctangcaccccctgcttctgcaagcctcgcactgtccgctgggagcactgactcagggtangcagcttatccagtaagccgggggcatccagcatgctctctggttctgacccagacagaggagactaaaaacaaatcctcttttgctccatggctggctctggcacaacatgagcattcggcttggccgtgcctcatgagtgcgaatgcctgtgcccaggatgtttctagcaggctttgccagccttgtctggagtcatcagtgtggtaaggagcacaaggatatagatggagact

SEQ ID NO: 1517 - DNA, 378 bp, Bos taurus
  Clone ID: 37-LIB2809-005-Q1-E1-B2
tgaaacgccctgagcagggcactgctccacaactcaggggacctggtgggggtgggggcagacaacctctggagcttcccattggacccagctgtgaaagctcagggctttctacctggcaggtcttggagtgacctgttccggaggcggtttagagcttgggccttggggtcagagttcaagccgtggtctcgtgcaagtgacttcacccctctgtgccttttcaaagtggaactgatcacagtgcctcccttctagtggtggtgcgagaatcagaaacaggatgtatgagaaatgctgagtgcattgcccggcaatagagtatacaatcaagaaataactgcaatgaacgtgattccgccttcccaggaccctctc

SEQ ID NO: 1518 - DNA, 446 bp, Bos taurus
  unsure (10),(52): unsure at all n locations; Clone ID: 37-LIB2809-014-Q1-E1-B2
gataccctgngcacaaggacaccatccagccttgtgtagggtcatggtatanatcagatccacggaacacagttagaatagaaagataagttggttttgatcatcagttgtaaagcatgcatctgatgacctgtggaattaaaactaccccacaggcatttccaagcggtaggtgcttggtcagaggatctaatctacagtgatcttccattagattttttttttttcctactgagaggaacaactcaaaagacaaggatgcctttagtttagcctaagctctgtagcctccatctatccaattaatacaggaagaaatgttctcctcctttccatccttggagctcaacagtggcagagcatttggtattgtatattttcaacctttaaatagaataaagccaggtttctgcctagacaactgaggttacagggacaaagggacc

SEQ ID NO: 1519 - DNA, 168 bp, Bos taurus
  unsure (154): Clone ID: 37-LIB2809-017-Q1-E1-B10
gccatgggcacgggatactgtgaaatgtgttacctagcgctctcgtttggaaaccaagccaagttccaactaagaaagaacacctttgtaaaatttggtatactgccttttaaacgttcttccgcagccacacccacaccacacacctctccanatatgtaaatatgt

SEQ ID NO: 1520 - DNA, 432 bp, Bos taurus
  Clone ID: 37-LIB2809-020-Q1-E1-B2
cgccatgggcccgggatacttagaaatcacatgtctacgtggttttgatgtaaacagaaataggctgcactttgttgtttcagttgtcatgtatttgtgagaaggatattgtgagtgcagatctattctgcctgctcagaactaggttaaaccctcatctttgatattacagaaaagtctcttaaaatagttcctggtatgttctatgagtgatgtggtcatccaccgcagagaaacaagaactgttttcatagtctgactccctggcaggagagaaacttgcctggctttcaagtgtatttatttgccattgaagtcaaaacgtgtaatctgtttcttcttaggaagctagaatatatattttcttttactttaaacattttagattacttacaatcaaattcgacttaggttttaaaaggactaaagtgt

SEQ ID NO: 1521 - DNA, 414 bp, Bos taurus
  Clone ID: 37-LIB2809-022-Q1-E1-B2
gccatagggcgcgggatacttttaacagcttggattttaaacactaataatgtcttgtgagtattctgtgtgtgttgggagagggaaaaatgctgattggtgtttcacattgtatgaaatttttgaaactcggagcaataatgccatgccgttgtgattttcttccactcttctcaaattccgcatttaaaacatgtttctttataggagctcacatcccattaagccttgtcagtgttgcagcggctctgatgtggggtgggatcttcactgtgttacattccattttacattcgaagtaggattgagctctgtgttttggggaacagccagggaatcttatttatccccttgtgtgttccttatctaggtaagcaaacgttccactagtctttttactcaaccatgaaattg

SEQ ID NO: 1522 - DNA, 372 bp, Bos taurus
  Clone ID: 37-LIB2809-025-Q1-E1-B2
gatacatatggagtatctacacttattgtttgctgttacattgattcctgggcaaaagttttgtcccaaaaattcattatgcggcaaacccgcaaaccggtacctaggaatccccaatttttgaagccatgacatccaaggcacaacggttttgaaatttaccaacagccctgaaaatattatcatacacacagcagatatggacatgaacagagttgctagagacaccacactctgacctgctgctatagccagtgccatggcactcgctgaataacgccaccatcatcagggtaaccatcatgatgaagagggcctccacccttggcttcaatcgtaagaagaagtatgttacacaagtaagtataatac

SEQ ID NO: 1523 - DNA, 454 bp, Bos taurus
  Clone ID: 37-LIB2809-032-Q1-E1-B10
cgccatgaggcgcgggatacccatgtaaatatagctttatgtttgacccaactctggctcctaaaattctttcttttttgggaggcagctatgctcaccaccataccaccaatgtatctctttttgaagtctcaaaatgctgtagccatcttcttactatgaggggagctgaccaatatccccaagatggcagagtagaaagatgaaagaattttgacaatttcctgagctgctggaatcagcaattctggaaataaccaacctcaagatttcttgttatctagaataagaaatcttcctgttgtgaaagaaagaagacaattcgtctgcagcagagaccacttttaccacaaactaaatgcttcttctttatcctaagcctaaagtatatcaggacattgagatttgcttttgagtttaagactgccctgctccacagatatttcccagagtc

SEQ ID NO: 1524 - DNA, 341 bp, Bos taurus
  unsure (297),(300): unsure at all n locations; Clone ID: 37-LIB2809-032-Q1-E1-B2
cgcctagggcgcgggataccatgccagtgccccttgcagtagaagcatgaagtcctaattacttgaccaccagtgaaatcctggtttgggcagctcttgatggggccccataatcatctttttaaccagcttcctgaaggactgggatgcaggtggttcacaattggctttgagaaattaggatccaggctaaccccacaggctccctcctcctcaccagcttatgtgggagaacttagccctgagtctgaggatggaaggaagggaagagaaagtggcgtctggaagggaaattanganggacctgtgactgggcacccaggcctaggggacccccccat

SEQ ID NO: 1525 - DNA, 234 bp, Bos taurus
  unsure (92),(94): unsure at all n locations; Clone ID: 37-LIB2809-026-Q1-E1-B2
gtcctcaccgtccccgatggaacagtccacgacaccgacaccaagctcgacattttgaagacgactcacactgaccgtgtccgtttgactananccgggaggtccatatttacccaacgcgatttgcttctcgttaacacggatacggtggttgagtttccacagtgggattagttgaccgtcaaccaaaccgccgaggaggagacccctttcactaagagcagccatcttttc

SEQ ID NO: 1526 - DNA, 123 bp, Bos taurus
  Clone ID: 38-LIB2809-001-Q1-E1-B10
tcccgggccgacccaaacgtcaacccactcgtcggcctacatacagctgccctcgggttcatgcggacgcgttcctatacttacagtcggtgacccttaacctgcagccacatgcaaattggt

SEQ ID NO: 1527 - DNA, 484 bp, Bos taurus
  Clone ID: 38-LIB2809-004-Q1-E1-B10
catggccgggcgatacaccctggctaactccagggggctggggccaccttctgagtgaggcactttggaacctgcctttgcttcttgtgcttcccagtgaaggctaggcaccccctgcttctgcaagcctcgcactgtccgctgggagcactgactcagggtaggcagcttatccagtaagccgggggcatccagcatgctctctggttctgacccagacagaggagactaaaaacaaatcctcttttgctccatggctggctctggcacaacatgagcattcggcttggccgtgcctcatgagtgcgaatgcctgtgcccaggatgtttctagcaggctttgccagccttgtctggagtcatcagtgtggtaaggagcacaaggatatagatggagactctggaggccaagtgaaagtggcagcttgctcaactttgtaaagagaaacagtggttcagtgaccctgaccattctgtcagtaag

SEQ ID NO: 1528 - DNA, 411 bp, Bos taurus
  unsure (380): Clone ID: 38-LIB2809-004-Q1-E1-B6
ccggacgccatggccgcgcggataccaacacacgatgctaacatcactgattgaaaacaggaactgggcttttgaaacatgttctatctttcccttctttagtaaacagaaggtcggtttgatctggcaactcttccttccagcagttccaggtatcagtggcttagagtgtgaacccagtagcaccagagagaagatgctggatcactgccgctgctagtgctctggggtgggtgtgtgtggaggtggggaatgagtgtgaacggactgaactggaaagtttcctgtgggaagagcatggtcgctttagagcctgaaaggcagctgcatgaaggagaaggaagagttacgggttaggactaaaggggtctggctatgantctggctcagctactttgtgaccttgagtga

SEQ ID NO: 1529 - DNA, 320 bp, Bos taurus
  Clone ID: 38-LIB2809-005-Q1-E1-B6
ccatggccgccggatactgcatcagagtctatgcatgggctttgttccagttaaatggtcctaacgtgggttcccaaaaaaatttgggccccacaaatggggcttgagacccccctgtccggaaaaccccgcgtcatatgacacccttttggggccctccccaacattataaggtcctcatgagggtggtgggaaaaaattcctcaacctcagaagctgcagcacctcatccaagacactggtgggctgcacctgtggctactgtcacaaacagtgtgggtgtatgtcagtcacacacacccaactgggggcgggattca

SEQ ID NO: 1530 - DNA, 330 bp, Bos taurus
  Clone ID: 38-LIB2809-008-Q1-E1-B6
ggatactcagacagccgattttctttgtatacttgataatcagaaactctgcgctggcatgggtcacggctcggagagccctgtcacttagctcagggccacttgccctatgctcctgggaggacatcatcatccgtttgaccatgcgccccgggcggagcctttgactgcttcttctgccctgataagcgcagcccatggattcctgtgtgtgtgcaagcatctcactgagatgacgcccatatcgcagtcaggaagaacgtgcgttttacacacaagagttgcctggtgtctggatgcaccgccacctgcagtttatgggaagctcgg

SEQ ID NO: 1531 - DNA, 433 bp, Bos taurus
  Clone ID: 38-LIB2809-009-Q1-E1-B10
cgccatgggccgggatacacacgaagaactctgggaaatggtttgttcctcagactggaaatgccacaacctgagcttacactcaccgcggtccctggtatgttttctcgtcaccctcatgacttcagagacttcagacttgtggtcctttctctgttactagttctacacacctcacgctacttccttcctcttaagaggaatttcttgaatttcttaggactttctcattttgaaagagtgtagcttcatattgcttattattgggtccttttgtttgctttttaactcgactcacagtctgtcttcccctggagggcatgcatttcagtattatagaaatgcagtaaacggtaataaattatttacaagcacctagttcgtttaatcttacgtgaaagccattcgcttttggaaaacaaggagaataaat

SEQ ID NO: 1532 - DNA, 148 bp, Bos taurus
  Clone ID: 38-LIB2809-010-Q1-E1-B10
gaacctttgggtccctttgtccctgtaacctcagttgtctaggcagaaacctggctttattccatttaaaggttgaaaatatacaataccaaatgctctgccactgttgagctccaacgatggaaatgaagagaacatttcctcccgt

SEQ ID NO: 1533 - DNA, 399 bp, Bos taurus
  Clone ID: 38-LIB2809-010-Q1-E1-B6
gggataccgcaagaccttgactgaggcttaggatgtgagatgccatgaactttgctgaacagtgtctctgttcagcaaactaaccagcattccccacaacacagtctagggcagacgatagtatagaggagtgttggaagaaccttgggtccctttgtccctgtaacctcagttgtctaggcagaaacctggctttattctatttaaaggctgaaaatatacaataccaaatgctctgccactgttgagctccaaggatggaaaggaggagaacatttcttcctgtattaattggatagatggaggctacagagcttaggctaaactaaaggcatccttgtcttttgagttgttcctctcagtaggaaaaaaatataatctaatggaagatcactgtag

SEQ ID NO: 1534 - DNA, 205 bp, Bos taurus
  Clone ID: 38-LIB2809-019-Q1-E1-B10
cgggatacccaagtatatatagctttatgtttgacccaactctggctcctaaaattctttcttttttgggaggcacctatgctcaccaccataccaccaatgtacccctttttgaattcacaaattcctgtaccaatcttcttactatgagggaacctcaccattacccccaatatggcagtttaaagatataaaagatttttga

SEQ ID NO: 1535 - DNA, 405 bp, Bos taurus
  Clone ID: 38-LIB2809-026-Q1-E1-B10
gccatgggcgcgggatacaccctagctccctccagggggctggggccaccttctgagtgaggcactttggaacctgcctttgcttcttgtgcttcccagtgaaggctaggcaccccctgcttctgcaagcctcgcactgtccgctgggagcactgactcagggtaggcagcttatccagtaagccgggggcatccagcatgctctctggttctgacccagacagaggagactaaaaacaaatcctcttttgctccatggctggctctggcacaacatgagcattcggcttggccgtgcctcatgagtgcgaatgcctgtgcccaggatgtttctagcaggctttgccagccttgtctggagtcatcagtgtggtaaggagcacaatgatatatatggagactctg

SEQ ID NO: 1536 - DNA, 436 bp, Bos taurus
  Clone ID: 38-LIB2809-029-Q1-E1-B6
accgcaagaccttgactgaggcttaggatgtgagatgccatgaactttgctgaacagtgtctctgttcagcagactaaccagcattccccacaacacagtctagggcagacgatagtatagaggagtgttggaagaaccttgggtccctttgtccctgtaacctcagttgtctaggcagaaacctggctttattctatttaaaggttgaaaatagacaataccaaatgctctgccactgttgagctccagggatggaaaggaggagaacatttcttcctgtattaattggatagatggaggctacagagcttaggctaaactaaaggcatccttgtcttttgagttgttccgctcagtatgaaaaggaagaaatctaatggaagatcactgtagattagatcctgctgacaagcacctaccgcttggaaatgcctg

SEQ ID NO: 1537 - DNA, 381 bp, Bos taurus
  Clone ID: 38-LIB2809-031-Q1-E1-B6
accctgggcccaaggacaccatccagccttgtgtagggtcatggtatagatcagatccacggaacacaattagaatagaaagataagttggttttgatcatcagttgtaaagcatgcatctgatgacctgtggaattaaaactaccccacaggcatttccaagcggtaggtgcttggtcagaggatctaatctacagtgatcttccattagattttttttttcctaccgacaggaacgactcactcgacaaagatggattcagttaatccaacgcactgtctccaccatctatccaactaatacatgaaggaatatacgcccccctcctatccatcgatctcactaatgactgaccaatcagtagggtatatatacaacca

SEQ ID NO: 1538 - DNA, 203 bp, Bos taurus
  Clone ID: 38-LIB2809-032-Q1-E1-B6
gcagtacaagcatgaagtcctaaatacttgaccaccacttcaatcctgttttgggcagctcttgatggggccccataatcatctttttaaccagcttcctgggaggactgggatgcaagtggttcacaattggggttgagaaattaggatccaggctaaccccaaacgctccctcctcctcagcagcttatgtgggagaactt

SEQ ID NO: 1539 - DNA, 175 bp, Bos taurus
  unsure (84),(152): unsure at all n locations; Clone ID: 38-LIB2809-026-Q1-E1-B6
gagtcgtttgtccccaagaccgaccagtttccagtaccaaagccagcccacccccccaccaccaccgatcaccctctcaccaanaccgtcctcaccgtccccgacggaacagtccccgacaccgagtccaccctcgacatcttcaagatgantaccactgagcgtgtccgtttga

SEQ ID NO: 1540 - DNA, 473 bp, Bos taurus
  Clone ID: 39-LIB2809-005-Q1-E1-B12
tgctcgccgtagccatggccacgcgatacttttatcagattggattttaaacactaataatgtcttgtgagtattctgtgtgtgttgggagagggaaaaatactgattggtgtttcacattgtatgaaatttttgaaactcggagcaataatgccatgccgttgtgattttcttccactcttctcaaattccgcatttaaaacatgtttctttataggagctcacatcccattaagccttgtcagtgttgtagcggctctgatgtggggtgggatcttcactgtgttacattccattttacattcgaagtaggattgagctctgtgttttggggaacagccagggaagcttatttatccccttgtgtgttccttatctaggtaagcaaacgttccactagtcttttttactcatccacgatattgtagaccaatggttactcagactgtctgagtcaaggttgggactgacct

SEQ ID NO: 1541 - DNA, 359 bp, Bos taurus
  Clone ID: 39-LIB2809-009-Q1-E1-B4
gggatacacacagagccctacacaagatgcctacccctatgaaaggtgcaaccccactagttttgatcgcttaacttgggattaaagaacacctagcagggcctctcgtgccccattaataccgatctggagtcctcgctgactcagcggcgcttttatttttttaatcaaaatagctgatgaggtggcaaacggtgacaactgacagcaggtcgcggcaactccaaaggccgagggagctcttcgtccactgctctggcttctgccctagggttacggttctgccactgcaaaatgctgtgaacaagtctctgtggccaaggtgtggcgaaggtcaataaatagagagctggtcagag

SEQ ID NO: 1542 - DNA, 431 bp, Bos taurus
  Clone ID: 39-LIB2809-011-Q1-E1-B4
gcgggatacaccttggctcccaccagggggctggggccaccttctgagtgaggcactttggaacctgcctttgcttcttgtgcttcccagtgaaggctaggcaccccctgcttctgcaagcctcgcactgtccgctgggagcactgactcagggtaggcagcttatccagtaagccgggggcatccagcatgctctctggttctgacccagacagaggagactaaaaacaaatcctcttttgctccatggctggctctggcacaacatgagcattcggcttggccgtgcctcatgagtgcgaatgcctgtgcccaggatgtttctagcaggctttgccagccttgtctggagtcatcagtgtggtaaggagcacaaggatatagatggagactctggaggccaagtgaaagtggcaacttgctcaactttg

SEQ ID NO: 1543 - DNA, 431 bp, Bos taurus
  Clone ID: 39-LIB2809-014-Q1-E1-B4
tgatcaaaggggcaatagcacatggaataaaactcaaaacaggacttcattcatgttttatacaaattcaatttaaccacttcaacactgtaaatctggataacttaatatctaactatacaagaaaatttaacatgttaatatgcatctttatttttgtaacttgatgacttaatttgtaagcaacaaagtggttaatcatacatccatctaaatttttttatagccttccatgtaaaactgtaaatcaattattaattttaaaattgttattgtattttcttattcctattccctttaccctattgacaacttgaaatgttaccacttcgtcctcatgatgttcatctatcaaccctgcttaggatgacaacaacttgaacagtgctaacggccatgaagaacgtatcaaaagacatagtttctgcctc

SEQ ID NO: 1544 - DNA, 365 bp, Bos taurus
  Clone ID: 39-LIB2809-016-Q1-E1-B4
tgggcccgggatacccatgtatatatagctttatgtttgacccaactctggctcctaaaattctttctttttttgggaggcagctatgctcaccaccataccaccaatgtatctctttttgaagtctcaaaatgctgtagccatcttcttactatgaggggagctgaccaatatccccaagatggcagagtagaaagatgaaagaattttgacaatttcctgagctgctggaatcagcaattctggaaataaccaacctcaagatttcttgttatctataataagaaatcttcctgttgtgaaagaaagaaaacaattcgtctgcatcagagaccacttttaccacaagactaaatgcttcttct

SEQ ID NO: 1545 - DNA, 328 bp, Bos taurus
  Clone ID: 39-LIB2809-023-Q1-E1-B4
aggtcaggatagatcagatcacggaacacaattagaatagaaagataagttggttttgatcatcagttgtaaagcatgcatctgatgacctgtggaattaaaactaccccacaggcatttccaagcggtaggtgcttggtcagaggatctaatctacagtgatcttccattagattttttttttttcctactgagaggaacaactcaaaagacaaggatgcctttagtttagcctaagctctgtagcctccatctatccaattaatacaggaagaaatgttctcctcctttccatccttggagctcaacagtggcagagcatttgggg

SEQ ID NO: 1546 - DNA, 385 bp, Bos taurus
  unsure (23): Clone ID: 39-LIB2809-025-Q1-E1-B12
gggatacatcaaatatacctcanaaaaacctgaagaaggaggtaaaagttatatcaaaaaaatccggaaccccaaaggcttggaaaatggacaaaaggaactccgaatttaaaatcactttttagtcccaaaaacaatgccagaacaactcgcctgccagtctaagggtgttctcccaggctccaaggcttcctgcttctcctccatctctcaaaacctggcttggggcccttggcttgagagtaaccccatgctggggatgtgctaagtcaaaagaaagaaagaaagaaagaaattgagaatcatatttctagaacgagatgtatgaaaaggtcagaatgtggtatcattgtctcatgaatcctgaactacagtcctcattccc

SEQ ID NO: 1547 - DNA, 419 bp, Bos taurus
  Clone ID: 39-LIB2809-027-Q1-E1-B12
cctgggaccaaggacaccatccagccttgtgtagggtcatggtatagatcagatccacggaacacaattagaatagaaagataagttggttttgatcatcagttgtaaagcatgcatctgatgacctgtggaattaaaactaccccacaggcatttccaagcggtaggtgcttggtcagaggatctaatctacagtgatcttccattagattttttttttttcctactgagaggaacaactcaaaagacaaggatgcctttagtttagcctaagctctgtagcctccatctatccaattaatacaggaagaaatgttctcctcctttccatccttggagctcaacagtggcagagcatttggtattgtatattttcaacctttaaatagaataaagccaggtttctgcctagacaactg

SEQ ID NO: 1548 - DNA, 345 bp, Bos taurus
  unsure (17),(57),(291): unsure at all n locations; Clone ID: 39-LIB2809-027-Q1-E1-B4
tgaggcttaggatgtgngatgccatgaactttgctgaacagtgtctctgttcagcanactaaccagcattccccacaacacagtctaaggcagacgatagtatagaggagtgttggaagaaccttgggtccctttgtccctgtaacctcagttgtctaggcagaaacctggctttattctatttaaaggttgaaaatatacaataccaaatgctctgccactgttgagctccaaggatggaaaggaggagaacatttcttcctgtattaattggatagatggaggctacanagcttaggctaacctaaaggcatccttgtcttttgagttgttcccctcagttgg

SEQ ID NO: 1549 - DNA, 404 bp, Bos taurus
  Clone ID: 39-LIB2809-026-Q1-E1-B4
agacgacaaaccggtcaatcccgatatgtgtgtccccatacccgagtcgtttgtccccaagaccgaccagtttccagtcacaaacccagacgagccagtcaccaccaaagatcagacttccaccaacaccgtcctcaccgtcctcgatggaacagtccacgacaccgacaccaacctcgacattttgaagatgactgacactgaccgtgtccgtttgactaaatccgcgaagtccatatttacccaacccgacttgtttctcgttaccacggatacggcggctgagtttccacagtgggattagttgaccgtcaaccaaaccccccaggacgagacccctttcactaccaccacccatcttttctcccaacgtcttagccctcccgggacccaagccatacagt

SEQ ID NO: 1550 - DNA, 436 bp, Bos taurus
  unsure (336): Clone ID: 40-LIB2809-001-Q1-E1-B8
acccatgtatatatagctttatgtttgacccaactctggctcctaaaattctttctttttttgggaggcagctatgctcaccaccataccaccaatgtatctctttttgaagtctcaaaatgctgtagccatcttcttactatgaggggagctgaccaatatccccaagatggcagagtagaaagatgaaagaattttgacaatttcctgagctgctggaatcagcaattctggaaataaccaacctcaagatttcttgttatctagaataagaaatcttcctgttgtgaaagaaagaaaacaattcgtctgcagcagagaccacttttaccacanactaaatgcttcttctttatcctaagcctaaagtatatcaggacattgagatttgcttttgagttttaggactgccctgctccacagatatttcccagag

SEQ ID NO: 1551 - DNA, 482 bp, Bos taurus
  Clone ID: 40-LIB2809-004-Q1-E1-B12
atggccggggcgataacatgtataaatagctttatgtttgacccaactctggctcctaaaattctttcttttttgggaggcagctatgctcaccaccataccaccaatgtatctctttttgaagtctcaaaatgctgtagccatcttcttactatgaggggagctgaccaatatccccaagatggcagagtacaaagatgaaagaattttgacaatttcctgagctgctggaatcagcaattctggaaataaccaacctcaagatttcttgttatctagaataagaaatcttcctgttgtgaaagaaagaaaacaattcgtctgcagcagagaccacttttaccacaaactaaatgcttcttctttatcctaagcctaaagtatatcaggacattgagatttgcttttgagttttaggactgccctgctccacatatatttcccagattcaggacataaagggagcatactgggtgatgggc

SEQ ID NO: 1552 - DNA, 431 bp, Bos taurus
  Clone ID: 40-LIB2809-005-Q1-E1-B8
tggcggcggaaaaccctgggcaaaaggacacaatcaagccttgtgtagggccatggaataattaatttcaagggcacacttttaatataaagataagttgggtttgatcatcacttgtaaagcatgcatctgatgacctgtggaattaaaactaccccacaggcatttccaagcggtaggtgcttggtcagaggatctaatctacagtgatcttccactagattttttttttttcctactgagaggaacaactcaaaagacaaggatgcctttagtttagcctaagctctgtagcctccatctatccaattaatacaggaagaaatgttctcctcctttccatccttggagctcaacagtggcagagcatttggtattgtatattttcaacctttaaatagaataaagccaggtttctgcctagacaactg

SEQ ID NO: 1553 - DNA, 96 bp, Bos taurus
  Clone ID: 40-LIB2809-009-Q1-E1-B12
tttcactgaaacggcctcagctggatatttacgggaaaggcatttcctttgtgcgtgaggattccatagccatccttcactgttggctactcccat

SEQ ID NO: 1554 - DNA, 425 bp, Bos taurus
  Clone ID: 40-LIB2809-010-Q1-E1-B8
acaccctgactccctccagggggctggggccaccttctgagtgaggcactttggaacctgcctttgcttcttgtgcttcccagtgaaggctaggcaccccctgcttctgcaagcctcgcactgtccgctgggagcactgactcagggtaggcagcttatccagtaagccgggggcatccggcatgctctctggttctgacccagacagaggagactaaaaacaaatcctcttttgctccatggctggctctggcacaacatgaacattcggcttggccgtgcctcatgagtgcgaatgcctgtgcccaggatgtttctagcaggctttgccagccttgtctggagtcatcagtgtggtaaggagcacaaggatatagatggagactctggaggccaagtgaaagtggcagcttgctcaactttgt

SEQ ID NO: 1555 - DNA, 440 bp, Bos taurus
  Clone ID: 40-LIB2809-014-Q1-E1-B12
acccatgtaaatatagctttatgtttgacccaactctggctcctaaaattctttcttttttgggaggcagctatgctcaccaccataccaccaatgtatctctttttgaagtctcaaaatgctgtagccatcttcttactatgaggggagctgaccaatatccccaagatggcagagtagaaagatgaaagaattttgacaatttcctgagctgctggaatcagcaattctggaaataaccaacctcaagatttcttgttatctagaataagaaatcttcctgttgtgaaagaaagaaaacaattcgtctgcagcagagaccacttttaccacaaactaaatgcttcttctttatcctaagcctaaagtatatcaggacattgagatttgcttttgagttttaggactgccctgctccacagatatttcccagagtcaag

SEQ ID NO: 1556 - DNA, 419 bp, Bos taurus
  Clone ID: 40-LIB2809-021-Q1-E1-B8
accctgggcccaaggacaccatccagccttgtgtagggtcatggtatagatcagatccacggaacacaattagaatagaaagataagttggttttgatcatcagttgtaaagcatgcatctgatgacctgtggaattaaaactaccccacaggcatttccaagcggtaggtgcttggtcagaggatctaatctacagtgatcttccattagattttttttttcctactgagaggaacaactcaaaagacaaggatgcctttagtttagcctaagctctgtagcctccatctatccaattaatacaggaagaaatgttctcctcctttccatccttggagctcaacagtggcagagcatttggtattgtatattttcaacctttaaatagaataaagccaggtttctgcctagacaactg

SEQ ID NO: 1557 - DNA, 397 bp, Bos taurus
  Clone ID: 40-LIB2809-024-Q1-E1-B8
gggataccaaggacccagggacaccatccagccttgtgtagggtcatggtatacatcagatccacggaacacaattagaatagaaagataagttggttttgatcatcagttgtaaaggatgcatctgatgacctgtggaattaaaactaccccacaggcatttccaagcggtacgtgcttggtcagaggatctaatctacagtgatcttccattagatttttttttttcctactgagaggaacaactcaaaagacaaggatgcctttagtttagcctaagctctgtagcctccatctatccaattactacaggaagaaatgttctcctcctttccatccttggcgctcaacagtggcagagcatttggtattgtatagtttcaacctttaaatacaa

SEQ ID NO: 1558 - DNA, 443 bp, Bos taurus
  unsure (158),(363): unsure at all n locations; Clone ID: 40-LIB2809-025-Q1-E1-B8
gccacgggcccgggatactggtgcttcctgagagagatgacataggattagagttgcttccctgtttcagtccatgccctcatttgcccactgaacacttgggtttgggacatgaccttcaggtcccttcagggctccaagggctctttgcagtctangggcacagcctgaggctgacctgggccctctcgcatctgcctggtggtcgcaggaagttgcctccacccagaagcaaagatggtcctcggtcccagacagctggataagggaagtgttgtgggtcagcactggccctcagcactcctggatgggggcagggagggtgggcaaaactttggaaagccaagcacggggtaatcctgngttccaagcaaggatcttattcattggatggtcaagcagcggtggctgaagagctgggtgatgatggatgggtcgactac

SEQ ID NO: 1559 - DNA, 451 bp, Bos taurus
  Clone ID: 40-LIB2809-029-Q1-E1-B8
acatagaaagtagtaaaatacatcatttttcatagaaaaaagcacacatgtaagctgcgggctgagtgagcctacagacagtatgaaaaaccagaacatgacgggaaaaaccggaaggaaaccaaaactttctattttgggggtcccagtaacactgtcggccagatttatcatcttatgggtgaggtgctgaaggcgccgtaggcactgttaaacattaaatgagaaggaggtccctgattagtaggagagcttctcctttgaagccctgtgttcatttctggaagataaatggttccagtttcgaaatgtttgtgagagtgaaagagatagcaagacctggttctgggcaaggagtttctagtccattatatgggccagttaatgaaggaactgggaattttacttttaaatgatagagttcactcctattggatgtttcagactccct

SEQ ID NO: 1560 - DNA, 401 bp, Bos taurus
  Clone ID: 40-LIB2809-031-Q1-E1-B8
acccatgtatatatagctttatgtttgacccaactctggctcctaaaattctttctttttttgggaggcagctatgctcaccaccataccaccaatgtatctctttttgaagtctcaaaatgctgtagccatcttcttactatgaggggagctgaccaatatccccaagatggcagagtagaaagatgaaagaattttgacaatttcctgagctgctggaatcagcaattctggaaataaccaacctcaagatttcttgttatctagaataagaaatcttcctgttgtgaaagaaagaaaacaattcgtctgcagcagagaccacttttaccacaaactaaatgcttcttctttatcctaagcctaaagtatatcaggacattgagatttgcttttgagtt

SEQ ID NO: 1561 - DNA, 372 bp, Bos taurus
  Clone ID: 40-LIB2809-032-Q1-E1-B8
gggcccgggataacgcaagaccttgactgaggcttaggatgtgagatgccatgaactttgctgaacagtgtctctgttcagcaaactaaccagcattccccacaacacagtctaaggcagaccatagtatacaagagtgttggaagaaacttgggtccctttgtccctgtaacctcagttgtccaagcaaaaacctggccttaatccaattaaaaggttaaaatatacaataccaaatgctccgccactgttgagctcccacgattgaaaagaagagaacatttcttcctgtaataattggatagatggacgccaaacaacttaagccaaaccaaaggcatccttgtcctttgaattgttccccccaatagg

SEQ ID NO: 1562 - DNA, 73 bp, Bos taurus
  Clone ID: 40-LIB2809-026-Q1-E1-B8
aaaattaatggtaaccgaaaaattagtaataagggaaattaaaacccaaaaatgggaagggatttacccaaaa

SEQ ID NO: 1563 - DNA, 387 bp, Bos taurus
  Clone ID: 41-LIB2809-003-Q1-E1-C2
tgccctgactcggaagagggaggcagctgcccgcctgctgaaggtgctcacagacctggaccaagcccacgaggagttccagcagcaggaacaggggaaggtggtttcgggccccctgaggccctaaggagatgccagagtcagcctggaaggaggagggaggagccactgggcccttctcaacatcccctggcccaggaatcccctcgtggctgccctgcacctcactgatgctgtgacttgcaggctcctatagatatcctagtcccatgtgtcctaagcccggaacccaggcatggaagtcctttggctggggaccagccttgcactgaatgaatctctccctctgggttgaggcagactggagtggatggaataaggaatctg

SEQ ID NO: 1564 - DNA, 399 bp, Bos taurus
  Clone ID: 41-LIB2809-004-Q1-E1-C2
atacacttttcttaattatgatccagctcaggcttctctcttttacaaaagacctgcttcaaccaggagcagctgctcccatacagtccaacgcagcccaattcaggggaaatggtgtaattgtctgggatttggggaagatttggtgtggcctttttcccttcgcggtgctcctcatatcccctggcagggttttcgtaagagagcagtcgtgtccctgagctggcaggtggaggatgagtgtgggaattggggaacatttgagggagatggttcagctctgccacaagagccttgggtgcttcttaacccagctaatttacgaagcaggtcggcatatgttctggctaaagcctagtgctgataaaaatcacccctgctgagtcttctgaagtaaga

SEQ ID NO: 1565 - DNA, 470 bp, Bos taurus
  Clone ID: 41-LIB2809-005-Q1-E1-C10
tgctcgccgtagccatggccagccgatacacgctggctacctccagggggctggggccaccttctgagtgaggcactttggaacctgcctttgcttcttgtgcttcccagtgaaggctaagcaccccctgcttctgcaagcctcgcactgtccgctgggagcactgactcagggtaggcagcttatccagtaagccgggggcatccagcatgctctctggttctgacccagacagaggagactaaaaacaaatcctcttttgctccatggctggctctggcacaacatgagcattcggcttggccgtgcctcatgagtgcgaatgcctgtgcccaggatgtttctagcaggctttgccagccttgtctggagtcatcagtgtggtaaggagcacaacgatatagatggagactctggaggccaagtgaaagtggcagcttgctcaactttgtaaagagaaacagtggttc

SEQ ID NO: 1566 - DNA, 431 bp, Bos taurus
  Clone ID: 41-LIB2809-005-Q1-E1-C2
accgacgtatatatagctttatgtttgacccaactctggctcctaaaattctttcttttttgggaggcagctatgctcaccaccataccaccaatgtatctctttttgaagtctcaaaatgctgtagccatcttcttactatgaggggagctgaccaatatccccaagatggtagagtagaaagatgaaagaattttgacaatttcctgagctgctggaatcagcaattctggaaataaccaacctcaagatttcttgttatctagaataagaaatcttcctgttgtgaaagaaagaaaacaattcgtctgcaacagaaaccacttttaccacaaactaaatgcttcttctttaacctaagcctaaagtatatcaggacattgaaatttgcttttgaattttaagactgccctgctccaaagatatttccc

SEQ ID NO: 1567 - DNA, 322 bp, Bos taurus
  unsure (183),(312): unsure at all n locations; Clone ID: 41-LIB2809-008-Q1-E1-C10
tacctcttagaaaacaaaccttgtgtttccatgccctgccatctggaaggcttactcccttccaaggcaatggaaaatacaagtcattccaactactccttctttaagaatttcattgtccctcactgacagcccacatatgaaagatgcatcatgcctccctggcaatacaggggccatganacgcgagcataaagcattccttgtgagagagactgctgaaaaggagccccctgccccagctaccccaaaaaagtacattccacaagcattgccttcttaatttacttcctttagctgtttaactttgtnagatgcaaag

SEQ ID NO: 1568 - DNA, 436 bp, Bos taurus
  Clone ID: 41-LIB2809-011-Q1-E1-C10
cggagaccatgtaaatatagatttatgtttgacccaactctggctcctaaaattctttcttttttgggagacagctatgctcaccaccataccaccaatgtatctctttttgaagtctcaaaatgctgtagccatcttcttactatgaggggagctgaccaatatccccaagatggcagagtacaaagatgaaagaattttgacaatttcctgagctgctggaatcagcaattctggaaataaccaacctcaagatttcttgttatctagaataacaaatcttcctgttgtgaaagaaagaaaacaattcgtctgcagcagagaccacttttaccacaaactaaatgcttcttctttatcctaagcctaaagtatatcaggacattgagatttgcttttgagttttaggactgccctgctccacagatatttccca

SEQ ID NO: 1569 - DNA, 420 bp, Bos taurus
  Clone ID: 41-LIB2809-011-Q1-E1-C2
acaccctgactccctccagggggctggggccaccttctgagtgaggcactttggaacctgcctttgcttcttgtgcttcccagtgaaggctaggcaccccctgcttctgcaagcctcgcactgtccgctgggagcactgactcagggtaggcagcttatccagtaagccgggggcatccagcatgctctctggttctgacccagacagaggagactaaaaacaaatcctcttttgctccatggctggctctggcacaacatgagcattcggcttggccgtgcctcatgagtgcgaatgcctgtgcccaggatgtttctagcaggctttgccagccttgtctggagtcatcagtgtggtaaggagcacaaggatatagatggagaccctggaggccaagtgaaagtggcagcttgctcaac

SEQ ID NO: 1570 - DNA, 419 bp, Bos taurus
  Clone ID: 41-LIB2809-016-Q1-E1-C10
gccatgtaaccgggatagtctacaacaaatgaaatcacaaaccctcaatgttaaagtcaactcaaaaagcaccaaatgttaacatttctagctatgcaactagcaagaacgttaagaattgcaggtgtggaaatgaaccataggcaagctctggaaaaccatgaatttgttatgtcaccttaagacaatgcacttttcctgcagaacggtttagacttaaggagggcactttaaggtatcaggtcctcttctccctcttgatcctatcagcaagtcacatctttacaatcttgttaatgaccttggatctctagcctctacacacagggcaacagaacccattgtgggaatggtatggtgggaacactgccttcaatttagtctgtagaatgacttttaagtccagctgtggcctaaac

SEQ ID NO: 1571 - DNA, 357 bp, Bos taurus
  Clone ID: 41-LIB2809-016-Q1-E1-C2
tgggcccgggatacaccctaactcactccagggggctggggccaccttctgagtgaggcactttggaacctgcctttgcttcttgtgcttcccagtgaaggctaggcaccccctgcttctgcaagcctcgcactgtccgctgggagcactgactcagggtaggcagcttatccagtaagccgggggcatccagcatgctctctggttctgacccagacagaggagactaaaaacaaatcctcttttgctccatggctggctctggcacaacatgagcattcggcttggccgtgcctcatgagtgcgaatgcctgtgcccaggatgtttctagcaggctttgccagccttgtccggag

SEQ ID NO: 1572 - DNA, 417 bp, Bos taurus
  Clone ID: 41-LIB2809-020-Q1-E1-C2
gggacacttctcactagtatgcttaaaactctcagctgctatcacaggtcatctatatgatgtagggatctgttccacattgccctgcgatgtaaagggtaaaagctgaacaggctactgcctgaagtaacagcaaagggatgacttcatttaatactgtggtcagctcacacagctaactccagggaactgttctttcagaactatgagaaattcagaattcctcggttgacactttgtccaaggaactattgccccagtgtttctccaaccgacatcataaaatggagtgtgattcagaatcatcagagaagctatttaaagaccctagtccttgagacagactcagaattaagcctagagtggattcaggcatgagtatgtttcacacgttctagagggggttctcatgaatac

SEQ ID NO: 1573 - DNA, 366 bp, Bos taurus
  Clone ID: 41-LIB2809-023-Q1-E1-C2
tacacatgtataaatagctttatgtttgacccaactctggctcctaaaattctttcgtttttgggaggcagctatgctcaccaccagaacaccaatgtatctctttttgaagtctcaaaatgctgtagccatcttcttactatgaggggagctgaccaatatccccaagatggcagagtagaaagatgaaagaattttgacaatttcctgagctgctggaatcagcaattctggaaataaccaacctcaagatttcttgttatctagaatatgaaatcttcctgttgtgaaagaaagaaaacaattcgtctgcagcagagaccacttttaccacaaactaaatgcttcttctttatcactaagccc

SEQ ID NO: 1574 - DNA, 181 bp, Bos taurus
  Clone ID: 41-LIB2809-029-Q1-E1-C2
tggacacaatccacccttgtgtatggtcatggtatagatcagatctacggaagacaagtagagtagacagataagttggttttgatcatcagttgtaaagcatgcatctgatgacctgtggaattacaactagtcccagaggcacttccaagccgtatgtgcatggtcagaagatccaatc

SEQ ID NO: 1575 - DNA, 445 bp, Bos taurus
  Clone ID: 41-LIB2809-032-Q1-E1-C10
gccataggcgcgggatacaccctgactccctccagggggctggggccaccttctgagtgaggcactttggaacctgcctttgcttcttgtgcttcccagtgaatgctaggcaccccctgcttctgcaagcctcgcactgtccgctgggagcactgactcagggtaggcagcttatccagtaagccgggggcatccagcatgctctctggttctgacccatacagaggagactaacaacaaatcctcttttgctccatggctggctctggcacaacatgagcattcggcttggccgtgcctcatgagtgcgaatgccggtgcccaggatgtttctagcaggctttgccagccttgtctggagtcatcagtgtggtaaggagcacaatgatatagatggagactctggaggccaagtgaaagtggcagcttgctcaacttttgtaag

SEQ ID NO: 1576 - DNA, 426 bp, Bos taurus
  unsure (418): Clone ID: 41-LIB2809-026-Q1-E1-C2
tcccgggcccatagacgacaaaccggtcaatcccgatatgtgtgtccccatacccgagtcgtttgtccccaagaccgaccagtttccagtcacaaacccagacgagccagtcaccaccaaagatcagacttccaccaacaccgtcctcaccgtcctcgatggaacagtccacgacaccgacaccaacctcgacattttgaagatgactcacactgaccgtgtccgtttgactaaacccgtgaagtccatatttccgcaacccgatttgtttctcgttaccacggatacggtggttgagtttccacagtgggattagttgaccgtcaaccaaaccgcccaggaggagacccctttcactaagcacacccatcttttctcccaccgtcttacccatcccgggaaccaacccatacagtanacagtctc

SEQ ID NO: 1577 - DNA, 409 bp, Bos taurus
  Clone ID: 42-LIB2809-006-Q1-E1-C6
acccatgtatatatagctttatgtttgacccaactctggctcctaaaattctttctttttttgggaggcagctatgctcaccaccataccaccaatgtatctctttttgaagtctcaaaatgctgtagccatcttcttactatgaggggagctgaccaatatccccaagatggcagagtagaaagatgaaagaattttgacaatttcctgagctgctggaatcagcaattctggaaataaccaacctcaagatttcttgttatctagaataagaaatcttcctgttgtgaaagaaagaaaacaattcgtctgcagcagagaccacttttaccacaaactaaatgcttcttctttatcctaagcctaaagtatatcaggacattgagatttgcttttgagttttaggact

SEQ ID NO: 1578 - DNA, 346 bp, Bos taurus
  Clone ID: 42-LIB2809-009-Q1-E1-C6
gggataccgcaggaccttgactgaggcttaggatgtgagatgccatgaactttgctgaacagtgtctctgttcagcaaactaaccagcattccccacaacacagtctagggcagacgatagtatagaggagtgttggaagaaccttgggtccctttgtccctgtaacctcagttgtctaggcagaaacctggctttattctatttaaaggttgaaaatatacaataccaaatgctctgccactgttgagctccaaggatggaaaggaggagaacatttcgtcctgtattaattggatagatggaggctacagagctgaggctaagctaaaggcatccttggctttt

SEQ ID NO: 1579 - DNA, 393 bp, Bos taurus
  Clone ID: 42-LIB2809-012-Q1-E1-C10
acatcaattatacctcaaaaaagcctgaggaggaggtaaagagttatatcagaaaactcgggagccccaaggcctgggagatgggacagaggaagctctgatttaaaactcacttttcagctcctacaagcaatgcccagaccagctcgcctgccagtctaggggtgttctcccaggctccaaggcttcctgcttctcctccatctctcaaaacctggcttggggcccttggcttgagagtaaccccatgctggggatgtgctaagtcaaaagaaagaaagaaagaaagaaattgagaatcatatttctagaacgagatgtatgaaaaggtcagaatgtggtatcattgtctcatgaatcctgaactacagtcctcattcccagtcccaattt

SEQ ID NO: 1580 - DNA, 411 bp, Bos taurus
  Clone ID: 42-LIB2809-014-Q1-E1-C10
accatgggaacaaggacaccatccagccttgtgtagggtcatggtatagatcagatccacggaacacaattagaatagaaagataagttggttttgatcatcagttgtaaagcatgcatctgatgacctgtggaattaaaactaccccacaggcatttccaagcggtaggtgcttggtcagaggatctaatctacagtgatcttccattagatttttttttttcctactgagaggaacaactcacaagacaaggatgcctttagtttagcctaagctctgtagcctccatctatccaattaatacaggaagacatgttcacctcctttccagccttggagctcaacaatggcagagcatttggtactgtatattttcagcctttagctagaataaagccaggtttctgcct

SEQ ID NO: 1581 - DNA, 396 bp, Bos taurus
  Clone ID: 42-LIB2809-015-Q1-E1-C10
accgcaaaaccttgactgaggcttaggatgtgagatgccatgaactttgctgaacagtgtctctgttcagcaaactaaccagcattccccacaacacagtctagggcagacgatagtatagaggagtgttggaagaaccttgggtccctttgtccctgtaacctcagttgtctaggcagaaacctggctttattctatttaaaggttgaaaatatacaataccaaatgctctgccactgttgagctccaaggatggaaaggaggagaacatttcttcctgtattaattggatagatggaggctacagagcttaggctaaactaaaggcatccttgtcttttgagttgttcctctcagtaggaaaaaaaaaaatctaatggaagatcactgtagatt

SEQ ID NO: 1582 - DNA, 391 bp, Bos taurus
  Clone ID: 42-LIB2809-023-Q1-E1-C6
gggatacaagggagcctcttaaaatcattctgggggcatggaaccccaaggagtagacagagttgccagtgctatccatatctaatatctcagcccttcccattctgctctagtacgaagacttagaagtgaaggcctgaaaaggttggccttgcttgatgctctagtgctgctgtgaatggggtaggacagttcagcctcaaaggttagaatctaacagcagctgtcttgacttaacatcggtctggggtttgcaaaaagaactgtatgtagtcatcgttgctagttgaatgtaagactgctttctggtttcttattttttatgtttgtacaagctttttttatttagaccttgattgtcactgtgtttttcccccccttttttttgttc

SEQ ID NO: 1583 - DNA, 357 bp, Bos taurus
  Clone ID: 42-LIB2809-025-Q1-E1-C6
gatactaaacaaacaataattcgtttatatttttactatttatcagcaattttgttgtcctatacgtggagccattgattatagccaatcactcacacatggttcactactatttacattacaaacttcaaattccgtctttgttcattcctacatccacggaggatgaatttactaactcagtttatgtggccttgctacatctcactcgttacgtgttcatgagatactgtctcgtgaaacttctacattccaaggacacacttatgtatgatgtactccatctctccttctgcagcttttatatttttatcaaacgatttgaagttatctgaaatggcaacccaatcaactatc

SEQ ID NO: 1584 - DNA, 363 bp, Bos taurus
  Clone ID: 42-LIB2809-026-Q1-E1-C10
accctgaacccaaggacaccatccagccttgtgtagggtcatggtatagatcagatccacggaacacaattagaatagagagataagttggttttgatcatcagttgtaaagcatgcatctgatgacctgtggaattaaaactaccccacatgcatttccaagcggtacgtgcctggtcagatgatctaatccacagtgatcttccattagattttttttttttcctactgagaggaaaaagtcaaaagacaaggctgcctttactttagcccaagctctgtaacctccagctatccaattagtacaaggagaaatgttctcctcccttccatccgtggagcccaacagtggcacagcaattg

SEQ ID NO: 1585 - DNA, 408 bp, Bos taurus
  Clone ID: 42-LIB2809-031-Q1-E1-C10
acatatccatctgttcaccatccaaaacacagagcaagcccagtgcctgacattcaggaggtgctcagtggacaccagctgaatgaatgacgggtgaacggtgggcaggcaggcagatggcaagctagagcaatagtagggccgccccacaccccactagaacccagaacacctagggtcaaagttccctggcatccagccctggagccctcagcagggctacgttctcacgtctctgcacgagcaggcccttcctggggccaccagggctcactgagaggacgccccccctccccctgccagcctcaccctacacccaaccatcttacacagagatggaggcgtgggcttgagagggtcctgggaaggcgggatcacgttcattgcagttatttcttgaatgtttac

SEQ ID NO: 1586 - DNA, 433 bp, Bos taurus
  Clone ID: 43-LIB2809-001-Q1-E1-C4
tggccgcgggataccgcaagaccttgactgaggcttacgatgtgagatgccatgaactttgctgaacagtgtctctgttcagcaaactaaccagcattccccacaacacagtctagggcagacgatagtatagacgagtgttggaaaaaccttgggtccctttgtccctgtaacctcagttgtctaggcagaaacctggctttattcgatttaaaggttgaaaatatacaataccaaatgctctgccactgttgagctccaacgatggaaaggaggagaacatttcttcctgtattaattggatagatggaggctacagagcttatgctaaactaaaggcatccttgtcttttgagttgttcctctcactaagaaaaatcaaaatctaatggaagatcactgtagattagatcctctgaccaagcacctaccg

SEQ ID NO: 1587 - DNA, 491 bp, Bos taurus
  unsure (397): Clone ID: 43-LIB2809-003-Q1-E1-C4
gcggcataccgcaagaccttgactgaggcttaggatgtgagatgccatgaactttgctgaacagtgtctctgttcagcaaactaaccagcattccccacaacacagtctagggcagacgatagtatagaggagtgttggaagaaccttgggtccctttgtccctgtaacctcagttgtctaggcagaaacctggctttattctatttaaaggttgaaaatatacaataccaaatgctctgccactgttgagctccaaggatggaaaggaggagaacatttcttcctgtattaattggatagatggaggctacagagcttaggctaaactaaaggcatccttgtcttttgagttgttcctctcagtaggaaaaaaaaaaatctaatggaagatcactngtagatagattctctgaccaagcacctaccgcttggaaatgcctgtggggtagttttaattccacaggtcatcagatgcatgctttacaactga

SEQ ID NO: 1588 - DNA, 328 bp, Bos taurus
  Clone ID: 43-LIB2809-013-Q1-E1-C12
tgtaacatattccgaggatgagatggatgagatatttatcgtggaaggcaacaatgatgagactgttggaggagaactcaggtcagcaagggaaaagatgaaacccgactctctactggaatcagaccccgtaaacagttacctcgccacaaagccccaaccacccttcaaaatacctgaggaggtgcccaatggcggctatggcttaatcatcaatggctacagtctggcccacgctctagaaggaaacctggagttggaactggtgcggacggcatgcatgtgcaagggggtgatctgctgccggatgacacccctccagaaagcc

SEQ ID NO: 1589 - DNA, 148 bp, Bos taurus
  Clone ID: 43-LIB2809-014-Q1-E1-C4
gatacctgctccagaaggccctcatgcctgtgctgctgcagggccaggcccttggcattgaaagtcatgccagacagctggaggggcctggtgaccaggactgtgaggcagcatctcaatctaaacaatgcagagcagctgtgcaggt

SEQ ID NO: 1590 - DNA, 402 bp, Bos taurus
  Clone ID: 43-LIB2809-017-Q1-E1-C12
gccatggccacgggataccgtcgactacccagcaggaaagaagggtttccggggttggccttcccccaaccaacaataaggcaaccggctgattaaaacggcggaggcggtcgacaaaactggggccaaggctttccgctcggggaacagtgaaggagcggcctctgcctgcccaccagtctctccactcagatgacgtttcctcccagctcggggtgaccttcaccactgagttctagctgatgctgttggatctgacccacactgaatgtagtctttcagaacaagacaacagttttttaaatcctggggaaaaaaaaaagtgttcctcgagtttcatgattctcattcaagtccttactgctaagaagaacaaattatcaactgtgcaaatttcagaac

SEQ ID NO: 1591 - DNA, 402 bp, Bos taurus
  Clone ID: 43-LIB2809-020-Q1-E1-C12
tttaatatgatccagctcaggcttctctcttttacaaaagacctgcgtcaaccaagagcagctgctcccatacagtccaacgcagcccaattcaggggaaatggtgtaattgtctgggatttggagaagatttggtgtggcctttttcccttctcggtgctcctcatatcccctggcagggttttcgtaagagagcagtcgtgtccctgagctggcatgtggaggatgagtgtgggaattggggaacatttgagggagatggttcatctctgccacaagagccttgggtgcttcttaacccagctaatttaaaaaccaaatcggcatatgttctggccaaagcctagtgctgataaaaatcacgcctgctgagtcctctgaagtaagatacgccggttctga

SEQ ID NO: 1592 - DNA, 119 bp, Bos taurus
  unsure (37): Clone ID: 43-LIB2809-024-Q1-E1-C12
tgggaccccctccagccttgtgtcgggtcgtggcctntctcttgtccgcggtccacgcttcgtctaccttgcccccttggttttggtcctcgcttgtccggcctgcctcggggggcctg

SEQ ID NO: 1593 - DNA, 370 bp, Bos taurus
  unsure (133),(306): unsure at all n locations; Clone ID: 43-LIB2809-027-Q1-E1-C12
aaggggctgggggcaacttccgaattaaggacctttgaaactgcctttgcctcctgtgcctcccaattaaaggtaaggaacccctgcctctgcaaacctcgcactgttcgctgggagcactgactcaggctangcaacttatccagtaagcccggggcatccagcatgctctctggttctgacccagacagaggagactaaaaacaaatcctcttttgctccatggctggctctggcacaacatgagcattcggcttggccgtgcctcatgagtgcgaatacctgtgcccacgatgtttctagcangctttgccagccttgtctggagtcatcagtgtggtaaggagcacaacgatatagatggagactc

SEQ ID NO: 1594 - DNA, 402 bp, Bos taurus
  unsure (227): Clone ID: 43-LIB2809-028-Q1-E1-C4
accatccagccttgtgtagggtcatggtatagatcagatccacggaacagaattagaatagaacgataagttggttttgatcatcagttgtaaagcatgcatctgatgacctgtggaattaaaactaccccacaggcatttccaagcggtaggtgcttggtcagaggatctaatctacagtgatcttccattagatgttttttttcctactgagaggaacaactcanaagacaaggatgcctttagtttagcctaagctctgtagcctccatctatccaattaatacaggaagaaatgttctcctcctttccatccttggagctcaacagtggcagagcatttggtattgtaaattttcaacctttaaatagaataaagccaggcttctgcctagacaactg

SEQ ID NO: 1595 - DNA, 358 bp, Bos taurus
  Clone ID: 43-LIB2809-026-Q1-E1-C4
acccaaaaccctttggaaggatgctcacaatggaacaatggtcatcaacaaactttctttagactcacacgttgagtcatgacgccccagacgcgtatgcagaatctctggtcgtcgatggcccaggtggttgttcccgaccacaaacatctacacctttggataggacggtggttgttgggaaccgtcagtgggtcgatcctccgtctccgtctgatgttcctcccggtagcagttgtgagaattccctggatattttttaggtccacagtatagaaccaaacatggattgacaacacccatcaattgacgtgtaaacacaaagtggtcccagacgtgaaatccaaaacccgtagat

SEQ ID NO: 1596 - DNA, 57 bp, Bos taurus
  Clone ID: 44-LIB2809-006-Q1-E1-C12
cggatactttgtattatttcagtctgagaagctgttccagataacccaggtaacgct

SEQ ID NO: 1597 - DNA, 408 bp, Bos taurus
  Clone ID: 44-LIB2809-012-Q1-E1-C8
acaccctgactccctccagggggctggggccaccttctgagtgaggcactttggaacctgcctttgcttcttgtgcttcccagtgaaggctaggcaccccctgcttctgcaagcctcgcactgtccgctgggagcactgactcagggtaggcagcttagccagtaagccgggggcatccagcatgctctctggttctgacccagacagaggagactaaaagcaaatcctcttttgctccatggctgactctggcacaacatgagcattcggcttggccgtgcctcatgagtgcgaatgcctgtgcccaggatgtttctagcaggctttgccagccttgtctggagtcatcagtgtggtaacgagcacaacgatatagatggagactctggaggccaagtgaaagtggc

SEQ ID NO: 1598 - DNA, 216 bp, Bos taurus
  Clone ID: 44-LIB2809-013-Q1-E1-C8
gatacaaatgtaaatgctgcttgcggttcgagccaacgctagatctcacaactctttcgtttctgggcttgagttatccttactatcaggtcagcagcgtgtcatgtttatggttctgactgtgctgtgcctgtcattgttgtatgagggtgagtctgacagaccatacattatggaagcctaaactgttgatcctgttgtgactcattcttgagc

SEQ ID NO: 1599 - DNA, 284 bp, Bos taurus
  Clone ID: 44-LIB2809-018-Q1-E1-C12
gccatgggcgcaaggatacctgaacttgtgggcacgatcgttccttgtgtggggtcttggtttccatcagctccaccgaacatgatttgttccgatacatgcgttggctttgatcatcagttgtaagccatgcttctgctgacctgtggtattagttgttgcccacaggcttttctaagcggtaggtgcctggtcacaggatcgactctacagtgatcttcctttacattttgttttttcggattgacaggtatatctcacaggacgcggatgcttttagttta

SEQ ID NO: 1600 - DNA, 428 bp, Bos taurus
  unsure (395): Clone ID: 44-LIB2809-018-Q1-E1-C8
acacttttactttattatgatccagctcaggcttctctcttttacaaaagacctgcttcaaccaagagcagctgctcccatacagtccaacgcagcccaattcggggaaatggtgtaattgtctgggatttggagaagatttggtgtggcctttttcccttctcggtgctcctcatatcccctggcagggttttcgtaagagagcagtcgtgtccctgagctggcaggtggaggatgagtgtgggaattggggaacatttgagggagatggttcatctctgccacaagagccttgggtgcttcttaacccagctaatttaaaaaccaaatcggcatatgttctggctaaagcctagtgctgataaaaatcacccctgctgagtcctctgaagtangatacgccggttctgagtcccctccactctgcc

SEQ ID NO: 1601 - DNA, 440 bp, Bos taurus
  unsure (415): Clone ID: 44-LIB2809-023-Q1-E1-C12
acacttttctttattatgatccagctcaggcttctctcttttacaaaagacctgcttcaaccaagagcagctgctcccatacagtccaacgcagcccaattcaggggaaatggtgtaattgtctgggatttggagaagatttggtgtggcctttttcccttctcggtgctcctcatatcccctggcagggttttcgtaagagagcagtcgtgtccctgagctggcaggtggaggatgagtgtgggaattggggaacatttgagggagatggttcatctctgccacaagagccttgggtgcttcttaacccagctaatttaaaaaccaaatcggcatatgttctggctaaagcctagtgctgataaaaatcacccctgctgagtcttctgaagtaagatacgccggttctgagtcncctccactctgccccctgaatcata

SEQ ID NO: 1602 - DNA, 320 bp, Bos taurus
  Clone ID: 44-LIB2809-026-Q1-E1-C12
ccatggtcccgggatacacaataatgttgcgatgggaactctgacactgcaagaaaacttagagttctcagcagcccatcggcttccaacaactatgacaagttacgagtaaaatgcacggcttaacaaagttaatcataaggtacgtctggctaaaatcgcacactccaacggtggtactcagtttatccgtggtgtgtcaggtcgagaaattccaagggccattatcgcaatggagcattgtaccgatacatccaccatgatcccaggatcagcccacatcttgattacactcaaccaaatcagatgcagtccttttg

SEQ ID NO: 1603 - DNA, 417 bp, Bos taurus
  Clone ID: 44-LIB2809-027-Q1-E1-C8
gggcccgggatacacctgaacccaaggacaccatccagccttgtgtagggtcatggtatagatcagatccacggaacacaattagaatagaaagataagttggttttgatcatcagttgtaaagcatgcatctgatgacctgtggaattaaaactaccccacaggcatttccaagcggtaggtgcttggtcagaggatctaatctacagtgatcttccattagatttttttttttcctactgagaggaacaactcaaaagacaaggatgcctttagtttagcctaagctctgtagcctccatctatccaattaatacaggaagaaatgttctcctcctttccatccttggagctcaacagtggcagagcatttggtattgtatattttcaacctttaaatagaataaagccaggttt

SEQ ID NO: 1604 - DNA, 442 bp, Bos taurus
  Clone ID: 44-LIB2809-028-Q1-E1-C12
cgccatgggcccgggataccctgaacgaacatcacttccctagtgaagagttgcagaaccacaatgcccagtgtcatcggtgctgctcagagaaaaaggatccaattctgctatttagaggctcatctggtggtcccactccaaaggctccgaagttttcacatcggttactgtggtagctcacaaagcaaaaaaaaaaaaaaaagtgattagtttgtagttcacatagtaggagggggtcagatgtgataagataaacagacagattttaaatcgttaaagtcaaattccatagtaaagtttcttaactggtaaaggagctaagccatcaagctgatacataattggatttagcatagtaaactttcttaaccagaatatctttttagccgctcagcaaaacccccatggccatctatctgggctaacacacttaaaatta

SEQ ID NO: 1605 - DNA, 424 bp, Bos taurus
  unsure (26): Clone ID: 45-LIB2809-003-Q1-E1-D2
agtctaccagcacacgtgcaacgganatctggaccctacaattcttgtttttttgggaggcagctatgctcaccaccataccaccaatgtagctctttttgaagtctcaaaatgctgtagccatcttcttactatgaggggagctgaccaatatccccaagatggcagagtacaaagatgaaagaattttgacaatttcctgagctgctggaatcagcaattctggaaataaccaacctcaagatttcttgttatctagaataagaaatcttcctgttgtgaaagaaagacaacaattcctctgcaccagagaccacttttaccacaaactaaatgcttcttctttatcctaagcctaaagtatatcaggacattgagatttgcttttgacttttaggactgccctgctccacagatatttccc

SEQ ID NO: 1606 - DNA, 419 bp, Bos taurus
  Clone ID: 45-LIB2809-004-Q1-E1-D2
ccataaccgccggatagaccctgggaccctccaaggggctggggccaccttctgagtgaggcactttgggacctgcctttgcttcttgtgcatcccattcaatgctaggcatcccctgcttctgcacgcctcgcactgtccgctgggatcactgactcagggtaggcagcttagccagtaaaccgggggcatccagcatgctctctggttctgacccatacataggagactacaaacaaatcctcttttgctccatggctggctctggcacaacatgagcattctgcttggccgtgcctcatcagtgcgaatgcctgtgcccaggatgtttctatcatgctttgccagccttgtctggagtcatcaatgtggtaaggagcataatggtatagatggagactctggaagccaagtgaaag

SEQ ID NO: 1607 - DNA, 455 bp, Bos taurus
  Clone ID: 45-LIB2809-005-Q1-E1-D10
ccgacgcctatgctcgccgtagccatggccaccggataccgcacgacaatgactgaggcttaggatgtgagatgccatgaactttgctgaacagtgtctctgttcagcaaactaaccagcattccccacaacacagtctagggcagacgatagtatagaggagtgttggaagaaccttgggtccctttgtccctgtaacctcagttgtctaggcagaaacctggctttattctatttaaaggttgaaaatatacaataccaaatgctctgccactgttgagctccaaggatggaaaggaggagaacatttcttcctgtattaattggatagatggaggctacagagcttaggctaaactaaaggcatccttgtcttttgagttgttcctctcagtaggaaaaaaaaaaaatctaatggaagatcactgtagattagattctcgtgacaagcacct

SEQ ID NO: 1608 - DNA, 441 bp, Bos taurus
  Clone ID: 45-LIB2809-005-Q1-E1-D2
cggatactgccaacccatattgtcatcaagcttttttttttctctgtctctagttattttaggagaacctggttgcttttaatgacaggtctcttttgtttcaggaaagaatccaattgggtaggagaatcaggcgggagggttggtagtggtgggtgggttattttgagatcgtgcccccatacctatgacaaagatccacaaagctttgccacgtttaaaaccaggagcaggtcatcattgcacaaaacatatccctaataagggctggatcactcaacctttttctttttatttttcttttctcactctctttctcatttttttcctatcttgtctgaaatggcttccccacaggacatttttaaatgattcttaattgcagggtatccaaatggagtatgtctgttgctggcatgtgaacactggctggacctgtgc

SEQ ID NO: 1609 - DNA, 180 bp, Bos taurus
  Clone ID: 45-LIB2809-009-Q1-E1-D2
tgccggttacgtcgtccgatgggacgcccatagcggaccactgtcactgttcatcaaggagctgagcattccccacaagggagtctagggaaatctatagtagagatgagtgttcggtgaatcttgggtcactttgatcctgtcacctcaattgtcgatgcctgcaccttacattattca

SEQ ID NO: 1610 - DNA, 450 bp, Bos taurus
  Clone ID: 45-LIB2809-011-Q1-E1-D2
tccgaccgccatggcgcgcgggatacccatgtatatacagctttaggtttgacccaactctggctccaagaattctttctttttttgggacgcatcgatgctcaccatcatagcaccactgtacctctttttgaagtcccaaaatgctgtacccatcttcttactatgaggggagctgaccaataactccaccatggcagagtagaaagatcacagaattttgacaatttcctgaactgctggaatcagcaattctggacacaatcaaccgcacgatttcttgttaactagaatacgagatcttcctgttgtaatacaaagaccagaattcatcagctgcatagaccacttttaccacaaactaaatgcttcttctttatcctaagcctaaagtgtatcaggacattgagatttgcgtctgagttttatgactgccctgctccacagata

SEQ ID NO: 1611 - DNA, 267 bp, Bos taurus
  Clone ID: 45-LIB2809-016-Q1-E1-D2
acaccctagctcactccagggggctggggccaccttctgagtgaggcactttggaacctgcctttgcttcttgtgcttcccagtgaaggctaggcaccccctgcttctgcaagcctcgcactgtccgctgggagcactgactcagggtaggcagcttatccagtaggccgggggcatccagcatgctctctggttctgatccagacggacgacactaaacatacctccccttttgctccattgctctctcttgaacatgagaatcat

SEQ ID NO: 1612 - DNA, 256 bp, Bos taurus
  Clone ID: 45-LIB2809-018-Q1-E1-D2
gatagtcggaaggacgagtaaagtaattctcttagagtatttccctctgaaagagagggggcttgacgaagaggaagaattacccaggttgcctcctttcctctcgctgctggacaggagatggagaggttgaggggcagggtctgtaggcagttcctaagagatacggttacaaaagaaaggctctgagatcatattgctgggggattcagaaggttactgagtaagttgttgggtgtcctgatatagaagctgg

SEQ ID NO: 1613 - DNA, 370 bp, Bos taurus
  Clone ID: 45-LIB2809-027-Q1-E1-D2
ttccatgtgaactgaggacagagcctcagaaactgtcacctcaaagctgaatcaatgaccatctctgtcactgtggcacaagcaatgcagcttctttcttaacacgacactgatttccttcttcaggactttctttgatggtattacgcaacaccggttcttttaaaggtaacaaaggtatcacaaaaaactccttggaaatcttctgcaattccacaaagaaacctggcaatttcatactttcattcctccccccatcacaatttttctttttctaaactacaagtgacaactcacatcagatttcattaatttactttaaataagggaaagcttttcagtgtctccccactccagataactgaaagat

SEQ ID NO: 1614 - DNA, 438 bp, Bos taurus
  Clone ID: 45-LIB2809-026-Q1-E1-D2
tcccgcgcccatatgagtacacgccggcggtcgacctgcagcatatcccacacgtgggaagcgcttccatcgatacgttcactattgtatactctgaggtaaatacgttccgctaatgatcctgatacgtctttggtctctcaaattcttacggcgtgagaattggagagaagatagcacggccaacgataaactctaaacggtcccctcggtaatcactcacgtaagtgagattaattcgcttcgcgtgagtcgggcgtttggactgcccaaaggtctgctcggacgtcgattaatcaatgccggaagcgcgccccacaccgcctttcgctattcccgcgtgttggcgttggtgcgtgagccagtgcgtcgcgtgcctgcttgccgtcgccccacgcctatgacgtgagtgaaaccgcctaatagccttatggagac

SEQ ID NO: 1615 - DNA, 277 bp, Bos taurus
  unsure (222),(269): unsure at all n locations; Clone ID: 46-LIB2809-001-Q1-E1-D10
acgtgacaacggctcagagcagactggtcaccctcaaaggacagggaggaagaatcaccacagtcgtcagcagaaaactaccagtgaacggtctcctcaggtgcttccagagaggaagagagcagccaaatacgccagagaaacgcctgaactgagaagaaacagtaatataattctgaataataacctactcctcacggaaacagttatccaagggaaaanaaaagtaactaccacttttttcccccctctcaatggaaaaacaacanaacacaaa

SEQ ID NO: 1616 - DNA, 418 bp, Bos taurus
  unsure (332): Clone ID: 46-LIB2809-001-Q1-E1-D6
tcggatactttggttgagaatattaaagtaattctcttagagtatttccctctgaaagagagggggcttgaagaagaggaagaattagccaggttgcctcctttcctctcgctgctggacaggagatggagaggttgaggggcagggtctgtaagcagttcctaagacatagggttacaaaagaaaggctctgagatcacattgctgggggattcagaacgttactgagtaagttgttgggtgtcctgatatataaactggttatacacacaagttagatgttgggttcatttcagtaattccactttctccttggattgagaaagcattanacggcttctccccacggtgttgaaccctttcactcattccttcgagtaccttcgagcggaaaatacaggactggctgggggatggg

SEQ ID NO: 1617 - DNA, 472 bp, Bos taurus
  Clone ID: 46-LIB2809-004-Q1-E1-D10
acccatcaggtaggaaaacaaagggagagactcatagtttaattgcctattacagagccgtcaggaaattcctggctctgtaaaggtttaatgtcttgctcacagacagaatcggtgaattatgattttattgtgttgacagcttgagccatggaaacagtagtggtttggaaactgatgcaaacgtctgtggattaaccctttgcacatctgatgctccctaccctggagaagagggggaacaaattcagcaagaattaagaatgtgcctaattttaagtgtgttagcccagatagatggccatgggggttttgctgagcggctaaaaagatattctggttaagaaagtttactatgctaaatccaattatgtatcagcttgatggcttagctcctttaccagttaagaaactttactatggaatttgactttaacgatttaaaatctgtctgtttatcttatcacatctg

SEQ ID NO: 1618 - DNA, 409 bp, Bos taurus
  Clone ID: 46-LIB2809-006-Q1-E1-D6
acccatgtatatatagctttatgtttgacccaactctggctcctaaaattctttcttttttgggaggcagctatgctcaccaccataccaccaatgtatctctttttgaagtctcaaaatgctgtagccatcttcttactatgaggggagctgaccaatatccccaagatggcagagtagaaagatgaaagaattttgacaatttcctgagctgctggaatcagcaattctggaaataaccaacctcaagatttcttgttatctagaataagaaatcttcctgttgtgaaagaaagaaaacaattcgtctgcagcagagaccacttttaccacaaactaaatgcttcttctttatcctaagcctaaagtatatcaggacattgagatttgcttttgagttttaggactg

SEQ ID NO: 1619 - DNA, 433 bp, Bos taurus
  Clone ID: 46-LIB2809-011-Q1-E1-D6
acccatgtatatatagctttatgtttgacccaactctggctcctaaaattctttcttttttgggaggcagctatgctcaccatcataccaccaatgtatctctttttgaagtctcaaaatgctgtagccatcttcttactatgaggggagctgaccaatatccccaagatggcagagtagaaagatgaaagaattttgacaatttcctgagctgctggaatcagcaattctggaaataaccaacctcaagatttcttgttatctagaataagaaatcttcctgttgtgaaagaaagaaaacaattcgtctgcagcagagaccacttttaccccaaactaaatgcttcttctttatcctaagcctagagtatatcaggacattgagatttgcttttgagttttacgactgccctgctccacagatatttcccag

SEQ ID NO: 1620 - DNA, 344 bp, Bos taurus
  Clone ID: 46-LIB2809-012-Q1-E1-D10
acatgcaggacctcccaatcggtgtatgaccacatgatgaatatggaaatttagtccacccaattgcttacttagcgtcggaatataagcttagctacccctacatcgccattccacacgggatccgctagaaactaacttccgtcgcattcaacatatccaataacccttgccaacatataaagctctccagatcataactcaatgctagacactgagcactggacatcattagcgcgatgcctaactccgcaataaggttatcattctgcaagttcgtacctcatgattgcaaatacctgtgccaattattcttcaaacaaggatatcgccccttgtcagga

SEQ ID NO: 1621 - DNA, 136 bp, Bos taurus
  Clone ID: 46-LIB2809-021-Q1-E1-D10
tcgtctctgcgccctgtgccctgtcttgtctctggtcttgtgcggcttcttctccttgggttcttgtctggctctctggtctttttctccttgctcggggtccctgctggctcttttctcggctttgtggctgctc

SEQ ID NO: 1622 - DNA, 70 bp, Bos taurus
  Clone ID: 46-LIB2809-023-Q1-E1-D10
gatatcaatgtaccggccgcctgctcgtcgatcccaggggcgcgctcccagctcgttcgctgcctggctt

SEQ ID NO: 1623 - DNA, 433 bp, Bos taurus
  Clone ID: 46-LIB2809-028-Q1-E1-D10
gggcccgggatacaccctggctccctccagggggctggggccaccttctgagtgaggcactttggaacctgcctttgcttcttgtgcttcccagtgaaggctaggcaccccctgcttctgcaagcctcgcactgtccgctgggagcactgactcagggtaggcagcttatccagtaagccgggggcatccagcatgctctctggttctgacccagacagaggagactaaaaacaaatcctcttttggtccacggctggctctggcacaacatgagcattcggcttggccgtgcctcatgagtgcgaatgcctgtgcccaggatgtttctagcaggctttgccagccttgtctggagtcatcagtgtggtaaggagcacaaggatatagatggagactctggaggccaagtgaaagtggcagcttgctcaactt

SEQ ID NO: 1624 - DNA, 425 bp, Bos taurus
  Clone ID: 46-LIB2809-029-Q1-E1-D6
acaccctgactccctccagggggctggggccaccttctgagtgaggcactttggaacctgcctttgcttcttgtgcttcccagtgaaggctaggcaccccctgcttctgcaagcctcgcactgtccgctgggagcactgactcagggtaggcagcttatccagtaagccgggggcatccagcatgctctctggttctgacccagacagaggagacgaaaaacaaatcctcttttgctccatggctggctctggcacaacatgagcattcggcttggccgtgcctcatgagtgcgaatgcctgtgcccaggatgtttctagcaggctttgccagccttgtctggagtcatcagtgtggtaaggaccacaaggatatagatggagactctggaggccaagtgaaagtggcagcttgctcaactttgg

SEQ ID NO: 1625 - DNA, 293 bp, Bos taurus
  Clone ID: 46-LIB2809-031-Q1-E1-D10
accctgagcccagcgacacgatcgacccttgtgtagggtcacggtcaacatcatatccacggaacacaagtagactagaatgacaacttggtttcgatcagcagttgtggaccatgcagctgaccagctgtggaagtaaaacgaccccaaaggccatttccaaacggtacgtgcaatgctcagatgatctaaccgacagtgatcttccagtgagatttttcatattcctacggatacgaacaacgcacacgattcagatgccattactttaccctaagctctgtaaccgccat

SEQ ID NO: 1626 - DNA, 416 bp, Bos taurus
  Clone ID: 47-LIB2809-003-Q1-E1-D12
tgctcgcggcagccatggccacggcatacagttgcgggagtataaatatagagtataaatggctctgtttgggaatctgtatctacacagggaaggtcaggggaaggctcagtttggtatcccaacctgctaaagtgattgagaagctagaatggggaaggacagggtctgggagcactgccgaatcgatcccctttcccaggcttagttgaagctcacttactctccagggagaactacgtttgttgagggtaagaagcaatggcaagaagaggtgtacataataatacaacgggggctctcaaaggcacagacaaggcatctgggccaagaaggagcacacttcttggatccacagacatgcacgcactccactgccacttgatgatcatgcttctgtgggcagtccagccatg

SEQ ID NO: 1627 - DNA, 518 bp, Bos taurus
  Clone ID: 47-LIB2809-003-Q1-E1-D4
cgatgcccatgccccggcagccatagccgcggcataccttggttggaatattaaagtaattctctttagagttattccccccggaaaaaaaagggggcttgaagaagaggaagaattagccaggttgcctcctttcctctcgctgctggacaggagatggagaggttgaggggcagggtctgtaggcagttcctaagagatagggttacaaaagaaaggctctgagatcacattgctgggggattcagaaggttactgagtaagttgttgggtgtcctgatatagaagctggttatacaaacaagttagatgttgggttcatttcattaattccactttctccttggattgagaaagcattagaaggcttctccccacggtgttgaaccctttcactcattccttctattaccttctagcggaaaatacaggactggctgggggatggggtagaatctctcaactaccctatcaattcttggctctgccatctttgtccactttctcctgctggtttt

SEQ ID NO: 1628 - DNA, 422 bp, Bos taurus
  Clone ID: 47-LIB2809-005-Q1-E1-D4
ataccgacgtataaatagcttaacgtttgacccaacactggatcctaaaagtcgttcatttttgggatgcaactatgctcaccaccatcaccaccaatgtatctctttttgaagtctcaaaatgctgattccatcttcttactatgatcgggatctgactaatatcccagttatcgcagaatagaaatatgattaaattttgacaattgcctgaactgttggtatcagcatttctggaaatagtcaacctcaaaagttcttgttgacgagaatatttcatcttcttgttgttagataaatagaagatttcgtctgcaggataaactacttttaccactgactaaatgcttcttccttatactaagcccaaagtatatcacgacattgagatttgcgtttgagatttacgactggcctgctcc

SEQ ID NO: 1629 - DNA, 374 bp, Bos taurus
  Clone ID: 47-LIB2809-006-Q1-E1-D4
gctcgccaccgccatgggcccgggatacaagctattttttttttttttttttttttttgcagcagtagtggtctttattaggctcctgacggggcggagggtgtaggggaaggatagggtggccccgccaggccccactgcaggcttcggagacttagagctgggagcgtggtccggcaggcccaggggagtcagtcctggtcagggtgggcagcatcacgcgaccgggaagtagtgggggaggcgttctcggtagatgttctcgtccttctccaggaacacgcagatgatcagccggtccaccttgtctttgtgctgctctagccactcgcgcaaagcggtcagcactacctcggccgccgcctcattggggt

SEQ ID NO: 1630 - DNA, 60 bp, Bos taurus
  unsure (15),(47): unsure at all n locations; Clone ID: 47-LIB2809-012-Q1-E1-D4
ccgagtcgcatgccncggtcgccatagcggccggagaccggatgaanagtgggtcggcag

SEQ ID NO: 1631 - DNA, 410 bp, Bos taurus
  Clone ID: 47-LIB2809-016-Q1-E1-D12
gccatgtaaccgggatgacacggagaactctgaggaaatggtttgttcctcagactggaaatgccacaacctgagcttacactcaccgcggtccctggtatgttttctcgtcaccctcatgacttcagagacttcagacttgtggtcctttctctgttactagttctacacacctcacgctacttccttcctcttaagaggaatttcttgaatttcttaggactttctcattttgaaagagtgtagcttcatattgcttattattgggtccttttgtttgctttttaactcgactcacagtctgtcttcccctggagggcatgcatttcagtattatagaaatgcagtaaacggtaataaattatttacaagcacctagttcgtttaatcttacgtgaaagccattcgct

SEQ ID NO: 1632 - DNA, 362 bp, Bos taurus
  Clone ID: 47-LIB2809-020-Q1-E1-D12
ggacaccgcatagccttaactgaggcttaggatgtgagatgccatgaactttgctgaacagtgtctctgttcagcaaactaaccagcattccccacaacacagtctagggcagaccatagtatagacgagtgttggaagaaccttgggtccctttgtccctgtaacctcagttgtctaggcagaaacctggctttattctagttaaaggttgaaaatatacaataccaaatgctctgccactgttgagctccaaggatggaaaggatgagaacatttcttcctgtattaattggatagatggaggctacagagcttatgcgaaactaaaggcatccttgtcttttgagttgttcctctcact

SEQ ID NO: 1633 - DNA, 376 bp, Bos taurus
  Clone ID: 47-LIB2809-020-Q1-E1-D4
gacacaagatagttacatctatcaaatttttatggaaaaaaatgagaaagttggagttcctacaattcagcaattattagaatgttcttttatcaacagtaacctgaaatttgctgaggcaccatcatgtctgattattcagatgcctcgatttggaaaagactttaaactctttaaaaaaatttttccttctctggaactaaatataacagatttacttgaagacacccccaggcagtgccggatatgtggagggcttgcaatgtatgagtgtagagaatgctatgatgaccctgacatctcagctggcacaatcaagcagttttgtaaaacctgcaatgctcaagtccaccttcagtctaagaggctgaatcat

SEQ ID NO: 1634 - DNA, 321 bp, Bos taurus
  Clone ID: 47-LIB2809-024-Q1-E1-D4
gactgaggcttatgatgtggcattccagaaactttgctaaacaatatctctgttcatgagaactttcaagcattccccacaacacagtctagggcataccagggtatagaggagtgttgcaataaccttgggtcgctttgtccctgtaacctcagttgtctatgcagaaacctggctttattctatttaaaggttgaaaatatacaataccaaatgctctgccactgttgagctccaatgatggaaatgaggagaacatttcttcctgtattaattgtatacatcgaggctacacaccttacgctaaggtaaaggcatcct

SEQ ID NO: 1635 - DNA, 436 bp, Bos taurus
  Clone ID: 47-LIB2809-025-Q1-E1-D12
gccatgggcccgggacacccatgaatatatagcttttagttttgaccaaacccgggtccctaaaattctttcttttttgggaggcagctatgctcaccacaataccacaaatgtatctctttttgaagtctcaaaatgctgtagccatcttcttactatgaggggagctgaccaatatccccaagatggcagagtacaaagatgaaagaattttgacaatttcctgagctgctggaatcagcaattctggaaataaccaacctcaagatttcttgttatctagaataagaaatcttcctgttgtgaaagaaagaaaacaattcgtctgcagcagagaccacttttaccacaaactaaatgcttcttctttatcctaagcctaaagtatatcaggacattgagatttgcttttgagttttaggactgccctgctcca

SEQ ID NO: 1636 - DNA, 428 bp, Bos taurus
  unsure (381): Clone ID: 47-LIB2809-026-Q1-E1-D4
cgcatcccgggcccatagatgtatatttcggaatagtctggtcgtcctaatattcttccgacagaagatctgggttaggaaaacccaagaggttctcctacgtcggggaatgattctcagaagcccgtatcgaggaatacttctcactatcaacataggtattgtaagtctcgatgtttaaaccaaagatccaggtctcggtgtcattttctcaacaggaattcgaaccgtcggtcgaattctgaaccgaaaatttattacattggaacgagtcaggcacgacccgtagatcatcccaccgtcgatgatgtagtgacatttcatatttagtaagaaccaactgagacagatcttacgtagacatcttatttgaactactanacactgtttttggggtccatgtcgtttttattttagacaattttttt

SEQ ID NO: 1637 - DNA, 444 bp, Bos taurus
  unsure (386): Clone ID: 48-LIB2809-006-Q1-E1-D12
accctgggcccaaggacaccatccagccttgtgtagggtcatggtatagatcagatccacggaacacaattagaatagaaagataagttggttttgatcatcagttgtaaagcatgcatctgatgacctgtggaattaaaactaccccacaggcatttccaagcggtaggtgcttggtcagaggatctaatctacagtgatcttccattagatttttttttttcctactgagaggaacaactcaaaagacaaggatgcctttagtttagcctaagctctgtagcctccatctatccaattaatacaggaagaaatgttctcctcctttccatccttggagctcaacagtggcagagcatttggtattgtatattttcaacctttanatagaataaagccaaggtttctgcctagacaactgaggttacagggacaaagggaccc

SEQ ID NO: 1638 - DNA, 448 bp, Bos taurus
  Clone ID: 48-LIB2809-007-Q1-E1-D8
atgctccagcagccatggccgcggcgatacctgggcccaaggacaccatccagccttgtgtagggtcatggtatagatcagatccacggaacacaattagaatagaaagataagttggttttgatcatcagttgtaaagcatgcatctgatgacctgtggaattaaaactaccccacaggcatttccaagcggtaggtgcttggtcagaggatctaatctacagtgatcttccattagatttttttttttcctactgagaggaacaactcaaaagacaaggatgcctttagtttagcctaagctctgtagcctccatctatccaattaatacaggaagaaatgttctcctcctttccatccttggagctcaacagtggcagagcatttggtattgtatattttcaacctttaaatagaatatagccaggtgtctgcctagacaactga

SEQ ID NO: 1639 - DNA, 450 bp, Bos taurus
  Clone ID: 48-LIB2809-008-Q1-E1-D8
gccaggcggccgggatacccatgtaaatatagctttatgtttgacccaactctggctcctaaaattctttcttttttgggaggcagctatgctcaccaccataccaccaatgtatctctttttgaagtctcaaaatgctgtagccatcttcttactatgaggggagctgaccaatatccccaagatggcagagtagaaagatgaaagaattttgacaatttcctgagctgctggaatcagcaattctggaaataaccaacctcaagatttcttgttatctagaataagaaatcttcctgttgtgaaagaaagaaaacaattcgtctgcagcagagaccacttttaccacaaactaaatgcttcttctttatcctaagcctaaagtatatcaggacattgagatttgcttttgagttttaggactgccctgctccacagatatttcccaga

SEQ ID NO: 1640 - DNA, 347 bp, Bos taurus
  Clone ID: 48-LIB2809-009-Q1-E1-D12
acaccctggctccctccagggggctggggccaccttctgagtgaggcactttggaacctgcctttgcttcttgtgcttcccagtgaaggctaggcaccccctgcttctgcaagcctcgcactgtccgctgggagcactgactcagggtaggcagcttatccagtaagccgggggcatccagcatgctctctggttctgacccagacagaggagactaaaaacaaatcctcttttgctccatggctggctctggcacaacatgagcattcggcttggccgtgcctcatgagtgcgaatgcctgtgcccaggatgtttctagcaggctttgccagccttgtctggagtc

SEQ ID NO: 1641 - DNA, 324 bp, Bos taurus
  Clone ID: 48-LIB2809-009-Q1-E1-D8
gcgatgggcgcgggataccgcaagaccttgactgaggcttaggatgtgagatgccatgaactttgctgaacagtgtctctgttcagcaaactaaccagcattccccacaacacagtctagggcagacgatagtatagaggagtgttggaagaaccttgggtccctttgtccctgtaacctcagttgtctaggcagaaacctggctttattctatttaaaggttgaaaatatacaataccaaatgctctgccactgttgagctccaaggatggaaaggaggagaacatttcgtcctgtattaattggatagatggaggctacaga

SEQ ID NO: 1642 - DNA, 282 bp, Bos taurus
  Clone ID: 48-LIB2809-015-Q1-E1-D8
gggatactaatttattttaaacaaaattcctctaaaacaaagtcgctatggtaacctgaaatttactccaggatatccgccttaaaacaaaagcaacctgagacggggaccatagggtgagaggagccgcgggactcgcatactccacggctgccggcaggggctcccgtgtccccagccccccgactgccatctgctacaggaatcttaccctcaagccacattcagacgaggctgaactaccaagatgtgacctcttgcctcctgcagatcagggtgaat

SEQ ID NO: 1643 - DNA, 74 bp, Bos taurus
  Clone ID: 48-LIB2809-016-Q1-E1-D8
ggatacaacgtaagtgactttgttagtttctaacgtgacaacaatcggtgtcacatgggaagattcagagcagc

SEQ ID NO: 1644 - DNA, 423 bp, Bos taurus
  Clone ID: 48-LIB2809-020-Q1-E1-D8
accttcaatgtgctctgaggacagagcctcagaaactgtcacctcaaagctgaatcaatgaccatctctgtcactgtggcacaagcaatgcagcttctttcttaacacgacactgatttccttcttcaggactttctttgatggtattacgcaacaccggttcttttaaaggtaacaaaggtatcacaaaaaactccttggaaatcttctgcaattccacaaagaaacctggcaatttcatactttcattcctccccccatcacaatttttctttttctaaactacaagtgacaactcacataagatttcattaatttacttaaaataacggaaggcttttcagtgtctccccactccagataactgaaagatttaatgaaactttcactccatttcacttatttagtgaaactcagtgccaa

SEQ ID NO: 1645 - DNA, 420 bp, Bos taurus
  Clone ID: 48-LIB2809-026-Q1-E1-D12
acaccctagctccctccatggggctggggccaccttctgagtgaggcactttggaacctgcctttgcttcttgtgcttcccagtgaaagctaagcaccccctgcttctgcaagcctcgcactgtccgctgggagcactgactcagggtaagcagcttatccagtaagccgggggcatccagcatgctctctggttctgacccagacagaggagactaaaaacaaatcctcttttgctccatggctggctctggcacaacatgagcattcggcttggccgtgcctcatgagtgcgaatgcctgtgcccaggatgtttctagcaggctttgccagccttgtctggagtcatcagtgtggtaaggagcacaaggatatagatggagactctggaggccaagtgaaagtggcagcttgctcaac

SEQ ID NO: 1646 - DNA, 402 bp, Bos taurus
  Clone ID: 48-LIB2809-031-Q1-E1-D8
acaccctggctccctccagggggctggggccaccttctgagtgaggcactttggaacctgcctttgcttcttgtgcttcccagtgaaggctaggcaccccctgcttctgcaagccccgcactgtccgctgggagcactgactcagggtaggcagcttatccagtaagccgggggcatccagcatgctctctggttctgacccagacagaggagactaaaaacaaatcctcttttgctccatggctggctctggcacaacatgagcattcggcttggccgtgcctcatgagtgcgaatgcctgtgcccaggatgtttctagcaggctttgccagccttgtctggagtcatcagtgtggtaaggagcacaaggatatagatggagactctggaggccaagtgaa

SEQ ID NO: 1647 - DNA, 425 bp, Bos taurus
  Clone ID: 49-LIB2809-008-Q1-E1-E10
tgggcccgggatactttggatggaatattaaagtaattctcttagagtatttccctctgaaagagagggggcttgaagaagaggaagaattagccaggttgcctcctttcctctcgctgctggacaggagatggagaggttgaggggcagggtctgtaggcagttcctaagagatagggttacaaaagaaaggctctgagatcacattgctgggggattcagaaggttactgagtaagttgttgggtgtcctgatatagaagctggttatacaaacaagttagatgttgggttcatttcattaattccactttctccttggattgagaaagcattagaaggcttctccccacggtgttgaaccctttcactcattccttctattaccttctagcggaaaatacaggactggctgggggatggggt

SEQ ID NO: 1648 - DNA, 323 bp, Bos taurus
  Clone ID: 49-LIB2809-017-Q1-E1-E10
acacagttaggctagaaagataccttggttttggtcatcacttgttgggcgtgcatcttgtgacttgtggggaataagctcgatccgcaggcacttccaagccgtaagtgcttgcatacgaaggtctaatctttcatgatcttccattatcttcttcttttttcctactgagaggaacaagtcacattacaaggatgcctttagtttagcctaagctccgtagcctccatctatccaattactacaggaagaactgttctcctcctttccatccttggagctcaacagtggcagatcatttggtattgtacaatttcaacccc

SEQ ID NO: 1649 - DNA, 152 bp, Bos taurus
  Clone ID: 49-LIB2809-020-Q1-E1-E2
ggacaaccctagctccatccagggggctggggccaccttctgagtgaggcactttggaacctgcctttgcttcttgtgcttcccagtgaaggctaagcaccccctgcttctgcaagcctcgcactgtccgctgggatcactgactcagggta

SEQ ID NO: 1650 - DNA, 452 bp, Bos taurus
  unsure (120): Clone ID: 49-LIB2809-021-Q1-E1-E2
atgcggcgtaccgccatgtatccgggatgaccctagctccctccagggggctggggccaccttctgagtgaggcactttggaacctgcctttgcttcttgtgcttcccagtgaaggctangcaccccctgcttctgcaagcctcgcactgtccgctgggagcactgactcagggtaggcagcttatccagtaagccgggggcatccagcatgctctctggttctgacccagacagaggagactaaaaacaaatcctcttttgctccatggctggctctggcacaacatgagcattcggcttggccgtgcctcatgagtgcgaatgcctgtgcccaggatgtttctagcaggctttgccagccttgtctggagtcatcagtgtggtaaggagcacaaggatatagatggagactctggaggccaagtgaaagtggcagcttgctcaactttgt

SEQ ID NO: 1651 - DNA, 295 bp, Bos taurus
  Clone ID: 49-LIB2809-028-Q1-E1-E2
tgggggttgtcgactgattacggaatagtgtttttacggttctaaagcgcaactcacatgacgcattaatgacccagaaactccgatctgatggtgtctgaatttctcacagtccatgccttatcggtgatcgacaccttacctggatgccgtaagcgttatcaaacagtgtggccccagaacgtgctctgctcactcacagctccctccttggagcccctttgcagctcagagcctgcataagtggctggtataaacgggggcctggcgagagaatgatcagtgtaactgtgtg

SEQ ID NO: 1652 - DNA, 411 bp, Bos taurus
  Clone ID: 49-LIB2809-030-Q1-E1-E10
acaccctggctccctccagggggctggggccaccttctgagtgaggcactttggaacctgcctttgcttcttgtgcttcccagtgaaggctaggcaccccctgcttctgcaagcctcgcactgtccgctgggagcactgactcagggtaggcagcttatccagtaagccgggggcatccagcatgctctctggttctgacccagacagaggagactaaaaacaaatcctcttttgctccatggctggctctggcacaacatgagcattcggcttggccgtgcctcatgagtgcgaatgcctgtgcccaggatgtttctagcaggctttgccagccttgtctggagtcatcagtgtggtaaggagcacaaggatatagatggagactctggaggccaagtgaaagtggcagc

SEQ ID NO: 1653 - DNA, 421 bp, Bos taurus
  unsure (382): Clone ID: 49-LIB2809-032-Q1-E1-E10
gcatggcccgaccgccattagcgcgggatgaccttggaaccataggtttccactgtgagccctataataaccctgcagacttcttcctggacatcattaatggagattcttctgctgtggtgttaaatagagaagacataggtgatgaagctaacgagaccgaagagccttccaaaaaagatactccactcatagaaaaattagctgagttttatgtcaactcctccttcttcaaggaaacaaaagttgaattagataaattctcaggggatcagagaaggaagaagcttccatcctgcaaggaggtcacttatgccacctccttctgtcatcagctcaaatggatttccaggcgttcattcaaaaatttactgggtaatcnccaggcttctatagctcagctaattgtgacagtcttcct

SEQ ID NO: 1654 - DNA, 338 bp, Bos taurus
  Clone ID: 49-LIB2809-026-Q1-E1-E2
cggatcccgggcccatagttttaagacgttccattttaaagagtactaatctgttctcactattgtctctctcttcccacacccaaaaatagtcattcctctttgagattctactcaatttttcaaagtgccacgaataatcggatcggcttctcattttgttggagtgttgtgaaattggcgatttaaaagatctttgtttatagcacgtgagatgggattaacggttctgactcttcgatcccgtgtcatctcccctcccatgttgagtctcttagattggattttagattgcacctaccattcacgtgtctcttttccccaagacggacgcaatg

SEQ ID NO: 1655 - DNA, 426 bp, Bos taurus
  unsure (387): Clone ID: 50-LIB2809-001-Q1-E1-E10
acatcaattatacctcaaaaaagcctgaggaggaggtaaagagttatatcagaaagctcgggagccccaaggcctgggagatgggacagaggaagctctgatttaaaactcacttttcagctcctacaagcaatgcccagaccagctcgcctgccagtctaggggtgttctcccaggctccaaggcttcctgcttctcctccatctctcaaaacctggcttggggcccttggcttgagagtaaccccatgctggggatgtgctaagtcaaaagaaagaaagaaagaaagaaattgagaatcatatttctagaacgagatgtatgaaaaggtcagaatgtggtatcattgtctcatgaatcctgaactacagtcctcattcccagtcncaatttatagctaaacatgttcaaagatacatatgctat

SEQ ID NO: 1656 - DNA, 229 bp, Bos taurus
  Clone ID: 50-LIB2809-003-Q1-E1-E6
tactaaaaaagaaacagttttagaatcaactacatttgtgtgtccatcacagtagtaagtccctaactgttatatttagaatgtcaatctttaataaactccaaaatctcattttgcaatctattgatcgtgaactgcaaacggaggctggggcccccgtggtgtgatctgcacgcggcgtgtcacctcagtgcccagcgatcacacatcaccgacgggagaaggcact

SEQ ID NO: 1657 - DNA, 388 bp, Bos taurus
  Clone ID: 50-LIB2809-009-Q1-E1-E10
accgcaagaccttgactgaggcttaggatgtgagatgccatgaactttgctgaacagtgtctctgttcagcaaactaaccagcattccccacaacacagtctagggcagacgatagtatagaggagtgttggaagaaccttgggtccctttgtccctgtaacctcagttgtctaggcagaaacctggctttattctatttaaaggttgaaaatatacaataccaaatgctctgccactgttgagctccaaggatggaaaggaggagaacatttcttcctgtattaattggatagatggaggctacagagcttaggctaaactaaaggcatccttgtcttttgagttgttcctctcagtaggaaaaaaaaatctaatggaagatcactg

SEQ ID NO: 1658 - DNA, 72 bp, Bos taurus
  Clone ID: 50-LIB2809-012-Q1-E1-E6
acactgcgcacaaggacaccatccagccttgtctacgttcatggcatacatcagatccacggaacaccatta

SEQ ID NO: 1659 - DNA, 363 bp, Bos taurus
  unsure (330): Clone ID: 50-LIB2809-026-Q1-E1-E6
cgcttccatcgataggttcactattgtatactctgaggtaaatacgttcccctactcatcctgatacgtctctggtctctcaaattcttatggcgcgagaattggagagaagatagcacggccaaccataaactctaaacggtcgcctcggtaatcactcacgtaagtgagattaattcgcttcgcgtgagtcgggcgtttggactgcccaaaggtctgctcggacgtcgattaatcaatgccggaagcgcgccccacaccgcctttcgctattcccgcgcgttggcgttggtgcgtgactccctcggtcgcgtgcctgcttgccgtcgncgacaccctatgacgtgagtgaaaacgcctaat

SEQ ID NO: 1660 - DNA, 188 bp, Bos taurus
  Clone ID: 51-LIB2809-006-Q1-E1-E4
ggatacggcctaggcagtggggaaaacgacatctacctgctagagctccaaactggttggctgagaatgtaggttaatgaactgtgtcccactcctgacggggacttgtagatgccgcagcagttatgggagaaaagttagtgtgctcacacaattatgattgcaaatataaccggatccctgcggtg

SEQ ID NO: 1661 - DNA, 470 bp, Bos taurus
  Clone ID: 51-LIB2809-007-Q1-E1-E4
gccgcggcatccccatgtatatataactttatgtttgacccaactctggctcctaaaattctttcttttttgggaggcagctatgctcaccaccataccaccaatgtatctctttttgaagtctcaaaatgctgtagccatcttcttactatgaggggagctgaccaatatccccaagatggcagagtagaaagatgaaagaattttgacaatttcctgagctgctggaatcagcaattctggaaataaccaacctcaagatttcttgttatctagaataagaaatcttcctgttgtgaaagaaagaaaacaattcgtctgcagcagagaccacttttaccacaaactaaatgcttcttctttatcctaagcctaaagtatatcaggacattgagatttgcttttgagttttaggactgccctgctccacagatatttcccagagtcaggagagaaagggagcatactgg

SEQ ID NO: 1662 - DNA, 437 bp, Bos taurus
  Clone ID: 51-LIB2809-010-Q1-E1-E4
tggggccgggctacaccctgactcactccagggggctggggccaccttctgattgaggcactttggaacctgcctttgcttcttgtgcttcccagtgaaggctaggcaccccctgcttctgcaagcctcgcactgtccgctgggagcactgactcagggtaggcagcttatccagtaagccgggggcatccagcatgctctctggttctgacccagacagaggagactaaaaacaaatcctcttttgctccatggctggctctggcacaacatgagcattcggcttggccgtgcctcatgagtgcgaatgcctgtgcccaggatgtttctagcaggctttgccagccttgtctggagtcatcagtgtggtaaggagcacaaggatatagatggagactctggaggccaagtgaaagtggcagcttgctcaactttgt

SEQ ID NO: 1663 - DNA, 105 bp, Bos taurus
  Clone ID: 51-LIB2809-012-Q1-E1-E4
gagacctttcaaattgtggtggggacatttggcatgcaggaaacaggagaccttgctctcaatggggcagcataatcagaacgagctgagttcagcacgccagtg

SEQ ID NO: 1664 - DNA, 361 bp, Bos taurus
  Clone ID: 51-LIB2809-013-Q1-E1-E4
accgcaagaccttgactgaggcttaggatgtgagatgccatgaactttgctgaacagtgtctctgttcagcaaactaaccagcattccccacaacacagtctagggcagacgatagtatagaggagtgttggaagaaccttgggcccctttgtccctgtaacctcagttgtctaggcagaaacctggctttattctatttaaaggttgaaaatatacaataccaaatgctctgccactgttgagctccaaggatggaaaggaggagaacatttcttcctgtattaattggatagatggaggctacagagcttaggctaaactaaaggcatccttgtcctttgagttgttcctctcagttag

SEQ ID NO: 1665 - DNA, 445 bp, Bos taurus
  Clone ID: 51-LIB2809-015-Q1-E1-E4
ccctgggaccaaggacaccatccagccttgtgtagggtcatggtatagatcagatccacggaacacaattagaatagaaagataagttggttttgatcatcagttgtaaagcatgcatctgatgacctgtggaattaaaactaccccacaggcatttccaagcggtaggtgcttggtcagaggatctaatctacagtgatcttccattagatttttttttttcctactgagaggaacaactcaaaagacaaggatgcctttagtttagcctaagctctgtagcctccatctatccaattaatacaggaagaaatgttctcctcctttccatccttggagctcaacagtggcagagcatttggtattgtatattttcaaccttttaaatagaataaagccaggttttctgcctaaacaactggaggttacagggaacaaaggaccc

SEQ ID NO: 1666 - DNA, 413 bp, Bos taurus
  Clone ID: 51-LIB2809-021-Q1-E1-E4
catgcggcaaaccgccatgagccgggatgcctgaacgaacatcaattccctagtgaagagttgcagaaccacaatgcccagtgtcatcggtgctgctcagagaaaaaggatccaattctgctatttagaggctcatctggtggtcccactccaaaggctccgaagttttcacatcggttactgtggcagctcacaaagcaaaaaaaaaaagtgattagtttgtagttcacatagtaggagggggtcagatgtgataagatagacagacagattttaaatcgttaaagtcaaattccatagtaaagtttcttaactggtaaaggagctaagccatcaagctgatacataattggatttagcatagtaaactttcttaaccagaatatctttttagccgctcagcaaaaccccca

SEQ ID NO: 1667 - DNA, 460 bp, Bos taurus
  Clone ID: 51-LIB2809-022-Q1-E1-E12
gctccgaccgacatgggcgcgggatacaccctgactccctccagggggctggggccaccttctgagtgaggcactttggaacctgcctttgcttcttgtgcttcccagtgaaggctaggcaccccctgcttctgcaagcctcgcactgtccgctgggagcactgactcagggtaggcagcttatccagtaagccgggggcatccagcatgctctctggttctgacccagacagaggagactaaaaacaaatcctcttttgctccatggctggctctggcacaacatgagcattcggcttggccgtgcctcatgagtgcgaatgcctgtgcccaggatgtttctagcaggctttgccagccttgtctggagtcatcattgtggtaaggagcacaaggatatagatggagactctggaggccaagtgaaagtggcagcttgctcaactttgtaaagagaaac

SEQ ID NO: 1668 - DNA, 415 bp, Bos taurus
  Clone ID: 51-LIB2809-025-Q1-E1-E4
gacactggataaagcaaaatcttgccttcagactgggcatataaaacgttgggagaaagaaaaatcgatgattcctgaaaagtcaaaactaaccagtgagaatccttaagtcgttgatttctagatggacaaacatgctgtatgacagacaggaccagcccacatcatggacatgttattcctggctaattatgttcatgtctcctggcttatctctggctgccaccttgcttgcatttatagagggacttgtgaaagcagtgccccacacctatggagtctcccgtgatgccccgaatttccctccattccccaccagaagtgagggttgtagacaatgcatagtatttctcatgtttgccacccagactgagagaaatgtcaccgtcccctcgcctgagaactgcacctcccc

SEQ ID NO: 1669 - DNA, 127 bp, Bos taurus
  Clone ID: 51-LIB2809-027-Q1-E1-E12
tgcctaatgacaaccatttttagtaagcatgcccctgagaatgggccccaagttgatcattctagtattcccaatgccctcccacagtaagtgctcagtatacagcaggtgctcagcatcagcaggt

SEQ ID NO: 1670 - DNA, 445 bp, Bos taurus
  Clone ID: 51-LIB2809-026-Q1-E1-E4
tcccgggcccatagattcctaccaatattaaactaattgtgctacactatttgcgtgtcaaacacacccccgttcaacaacaccaacaattacggaccttcggtggtttggtgtgcgtcgtccagaccagatccacaccttcaccccgaccctgtctaccgacttggtaacacatacccttagaaaacaaaccgtgtcacatgagattcgtcccccattgacaaccttagtcactaacttcttccctctggtcatatacaacgtccttatagaaagaacttacatcttcccttgacttgattaattggagtttgtggttccattcacaaacgattaccaccgttgtggggagcctcttcaacggtttgagtgattggttgtattaggttgaccgccaaaatagaccagtccgtcccccatccccctaccacgtgtgaagtagggt

SEQ ID NO: 1671 - DNA, 426 bp, Bos taurus
  unsure (142),(347): unsure at all n locations; Clone ID: 52-LIB2809-001-Q1-E1-E12
actggtgcttcctgagagagatgacataggattagagttgcttccctgtttcagtccatgccctcatttgcccactgaacacttgggtttgggacatgaccttcaggtcccttcagggctccaagggctctttgcagtctangggcacagcctgaggctgacctgggccctctcgcatctgcctggtggtcgcaggaagttgcctccacccagaagcaaagatggtcctcggtcccagacagctggacaagggaagtgttgtgggtcagcactggccctcagcactcctggatgggggcagggagggtgggcaaaactttggaaagccaagcaaggggtaatcctgngttccaggcaggatcttattcattggatggtcaagcagcggtggctgaagagctgggtgatgatggatgggtcgactac

SEQ ID NO: 1672 - DNA, 425 bp, Bos taurus
  unsure (411): Clone ID: 52-LIB2809-002-Q1-E1-E8
acccatgtatatatagctttatgtttgacccaactctggctcctaaaattctttcttttttgggaggcagctatgctcaccaccataccaccaatgtatctctttttgaagtctcaaaatgctgtagccatcttcttactatgaggggagctgaccaatatccccaagatggcagagtagaaagatgaaagaattttgacaatttcctgagctgctggaatcagcaattctggaaataaccaacctcaagatttcttgttatctagaataagaaatcttcctgttgtgaaagaaagaaaacaattcgtctgcagcagagaccacttttaccacaaactaaatgcttcttctttatcctaagcctaaagtatatcaggacattgagatttgcttttgagttttaggactgcnctgctccacagata

SEQ ID NO: 1673 - DNA, 441 bp, Bos taurus
  Clone ID: 52-LIB2809-005-Q1-E1-E8
accgcaagacattgactgaggcttaggatgtgagatgccatgaactttgctgaacagtgtctctgttcagcaaactaaccagcattccccacaacacagtctagggcagacgatagtatagaggagtgttggaagaaccttgggtccctttgtccctgtaacctcagttgtctaggcagaaacctggctttattctatttaaaggttgaaaatatacaataccaaatgctctgccactgttgagctccaaggatggaaaggaggagaacatttcttcctgtattaattggatagatggaggctacagagcttaggctaaactaaaggcatccttgtcttttgagttgttcctctcagtaggaaaaaaaaaaatctaatggaagatcactgtagattagatcctctgaccaagcacctaccgcttggaaatgcctgtggggt

SEQ ID NO: 1674 - DNA, 411 bp, Bos taurus
  Clone ID: 52-LIB2809-006-Q1-E1-E8
actaggaagtcccctgaggctccccagtcacgtcgaagggactagcagtgtttcccatgagttcaggacagtgcttcccatgccaagtccatgggaagtaacaattttgggagtgacagttgaggctggtgctttgctagcacacttggggctgacagatgcttgctgtgtccagggctactcttccaagtctgaaacccccaagcctccacactgtgcctccagcctcctgcctccaggctggaatcttgtgcacattcatgcctgctagggacagacagaaatcctccacaaaaccagacatgtcagcatcagaaaaggctctgatggagacaggatgaacttcagaatgggcttagcctggacctcaaactaattctagtgataaattagtggaaagagaaagaagac

SEQ ID NO: 1675 - DNA, 457 bp, Bos taurus
  unsure (442): Clone ID: 52-LIB2809-007-Q1-E1-E8
accaaaaaatgaatcagtatcaatttttttaagtaagagtgtagagcagtgatgttttcctcagcatatgatcctgttatacttgaaactgaagagaaacttcatatcctatacctttatttgtttagatcttataattcatcaagtgggtttttaatgtttttaactttcacattaagtctcaaaaatcatatttaaatttttagtgatattttcatgaacactccatcttttcctcaagtcattacttcaagttttagaataaaatccttctaggtaaaagaactgctatgattagagaactggatttcggccattttcaatccacaggcatagcacacagccaggtggtccagcctgagtctagtccaggttctcctgtgccctgaatggctcttctgctgccatagatgcaggtctacaaagacacatttgcaggtanagtccataattgtat

SEQ ID NO: 1676 - DNA, 415 bp, Bos taurus
  Clone ID: 52-LIB2809-013-Q1-E1-E8
actgtggaaaattcttgatgttcaattttacctgattttttttttttactatatagataccatggtattaggtgtatgatttctaatgcatttagtttgactactgaattatgaaccttcagaattttcacagttaccacttttaattcttacagaagcaagtaatatgtcccaccccccccataattttagtaacacttaaaaagtatattgaaagaatattttagttatggtccatacctcaaaaataaaaataccggtgtattggtcaacatttgccctcattatcaaccagtttcagctcacatcagagttatagtttcaaggccagacatactactggtttaaaatgaatgttatgtttttaatgtttcgtctctccccaaaaagcagcaatagtagtagatttaacaat

SEQ ID NO: 1677 - DNA, 269 bp, Bos taurus
  Clone ID: 52-LIB2809-019-Q1-E1-E12
gtaataaggaggggcccgtgtgtgagggccagagaacatggtaatggtctcaggtggcataacgcatccccggggaacggtcatgcatgctgacggcactgggtgggaggcgtatgcaggcgcgcgtccatgcagccccacagagttgtgggtgtcgtcagcagtgcccagtaaatgagatatacgcggagtgcatgtgtgcctaccagatttgcaggcgttaagatgcacattatctatggggaacgctagctactggccgtgcttcc

SEQ ID NO: 1678 - DNA, 436 bp, Bos taurus
  Clone ID: 52-LIB2809-025-Q1-E1-E8
gccactgggcgcgggatacacttttctttattatgatccagctcaggcttctctcttttacaaaagacctgcttcaaccaagagcagctgctcccatacagtccaacgcagcccaattcaggggaaatggtgtaattgtctgggatttggagaagatttggtgtggcctttttcccttctcggtgctcctcatatcccctggcagggttttcgtaagagagcagtcgtgtccctgagctggcacgtggaggatgagtgtgggaattggggaacatttgagggagatggttcatctctgccacaagagccttgggtgcttcttaacccagctaatttagaaaccaaatcggcatatgttctggctaaagcctaatgctgataaaaatcactcctgctgagtcttctgaagtaggatacgccggttctgattcccctc

SEQ ID NO: 1679 - DNA, 422 bp, Bos taurus
  unsure (393): Clone ID: 53-LIB2809-002-Q1-E1-F2
accgcaagaccttgactgaggcttaggatgtgagatgccatgaactttgctgaacagtgtctctgttcagcaaactaaccagcattccccacaacacagtctagggcagacgatagtatagaggagtgttggaagaaccttgggtccctttgtccctgtaacctcagttgtctaggcagaaacctggctttattctatttaaaggttgaaaatatacaataccaaatgctctgccactgttgagctccaaggatggaaaggaggagaacatttcttcctgtattaattggatagatggaggctacagagcttaggctaaactaaaggcatccttgtcttttgagttgttcctctcagtaggaaaaaaaaaaatctaatggaagatcactgtanattagattcctctgacaagcacctaccgc

SEQ ID NO: 1680 - DNA, 366 bp, Bos taurus
  Clone ID: 53-LIB2809-006-Q1-E1-F2
gccatggctacgggatacagcctggctccctccaaggggctggggccaccttctgagtgaggcactttggaacctgcctttgcttcttgtgcttcccagtgaaggctaggcaccccctgcttctgcaagcctcgcactgtccgctgggagcactgactcagggtaggcagcttatccagtaagccgggggcatccagcatgctctctggttctgacccagacagaggagactaaaaacaaatcctcttttgctccatggctggctctggcacaacatgagcattcggcttggccgtgcctcatgagtgcgaatgcctgtgcccaggatgtttctagcaggctttgccagccttgtctggagtcatc

SEQ ID NO: 1681 - DNA, 315 bp, Bos taurus
  Clone ID: 53-LIB2809-009-Q1-E1-F2
tggggcgggatacgcccggagaggtacttatttgctggggaaataaagccattctcaaagtatgtaaaattgagattatcaatttaacaagctatgtaatctaaattcccctgacagtcttcagttctgtcttagctaaggataaagtaaaagggtgataaagaagcaggcccagtaacagctgtaagagctgagcaatgaggttggttggtgggccgcctacagggggtcagactgacactggtgatgcagactccatggctgctctaaaatgctgcagcacatggcttcaggggcaaacctcaagggtaaact

SEQ ID NO: 1682 - DNA, 224 bp, Bos taurus
  Clone ID: 53-LIB2809-011-Q1-E1-F2
gttgcaggagtatcaatatagagtataaatggctctgtttgggaatctgtatctacacacggaaggtcaggggaaggctcaatttggtatcccaacctgctaaagtgattgacaacctagaatggggaaggacagggtctgggagcacacggctgcatcgatccgctttcgcaggcttagttgatgtccacttagtctccacggagaactaggtttgttcacgg

SEQ ID NO: 1683 - DNA, 439 bp, Bos taurus
  Clone ID: 53-LIB2809-013-Q1-E1-F10
ggataccgcaagaccttgactgaggcttaggatgtgagatgccatgaactctgctgaacagtgtctctgttcagcaaactaaccagcattccccacaacacagtctagggcagacgatagtatagaggagtgttggaagaaccttgggtccctttgtccctgtaacctcagttgtctaggcagaaacctggctttattctatttaaaggttgaaaatatacaataccaaatgctctgccgctgttgagctccaaggatggaaaggaggagaacatttcttcctgtattaattggatagatggaggctacagagcttaggctaaactaaaggcatccttgtcttttgagttgttcctctcagtaggaaaaaaaaaaaatctaatggaagatcactgtagattagatcctctgaccaagcacctaccgcttggaaatgcct

SEQ ID NO: 1684 - DNA, 319 bp, Bos taurus
  Clone ID: 53-LIB2809-014-Q1-E1-F2
gggctggggccaccttctgagtgaggcactttggaacctgcctttgcttcatgtgcttcccagtgaacgctatgcaccccctgcttctgcaagcctcgcactgtccgctgggagcactgactcagggtaggcaacttatccagtaagccgggggcatccagcatgctctctggttctgacccagacatatgagactaaaaacaaatcctcttttgctccatggctggctctggcacaacatgagcattcggcttggccgtgcctcatgagtgcgaatgcctgtgcccatcatgtttctaacaggctttgccaaccttgt

SEQ ID NO: 1685 - DNA, 90 bp, Bos taurus
  Clone ID: 53-LIB2809-018-Q1-E1-F2
ggatagtcgaaagtgggagtcatctgatcgacccagtaggatatcgctcaacgtcatttgatgcctaatttgcgtagtcgagtctgtgct

SEQ ID NO: 1686 - DNA, 331 bp, Bos taurus
  Clone ID: 53-LIB2809-027-Q1-E1-F10
tgatttataactcacttttcagctcctacaagcaatgcgcagaccagctcgcctgccagtctaggggtgttctcccaggctccaaggcttcctgcttctcctccatctctcaaaacctggcttggggcccttggcttgagagtaaccccatgctggggatgtgctaagtcaaaagaaagaaagaaagaaagaaattgagaatcatatttctagaacgagatgtatgaaaaggtcagaatgtggtatcattgtctcatgaatcctgaactacagtcctcattcccagtcccaatttatagctagacatgttcaaagatacatatgctatctt

SEQ ID NO: 1687 - DNA, 394 bp, Bos taurus
  unsure (33): Clone ID: 53-LIB2809-028-Q1-E1-F2
cacgtttaataaccgttgttaagctcacttganaacacaagacatttagcacccagtaaaagtaataaagcattatcatttgagctaagaccttttaagagatctgacttagaagtatcttcatcatagatgcacagtccaatttctcaacatacgttttagaaacttgggagaaaaaaaacgttaaaggaaaatctccatagcttttttaagaatcatatgtgaatcagtttttccctcaaaaggccttgaaacattggcatcttgaggtgctattaaaaaaaaaagaacaagatttttgttattaatcaaaagcttcaaatactggttttcattttttaaaacaatgtattataaatttttttttaataaaaggttaaaggcacagtgaaac

SEQ ID NO: 1688 - DNA, 416 bp, Bos taurus
  Clone ID: 53-LIB2809-030-Q1-E1-F2
gcatgcctccagccgccaagggcgcgggataccgcaagaccttgactgaggcttaggatgtgagatgccatgaactttgctgaacagtgtctctgttcagcaaactaaccagcattccccacaacacagtctagggcagacgatagtatagaggagtgttggaagaaccttgggtccctttgtccctgtaacctcagttgtctaggcagaaacctggctttattctatttaaaggttgaaaatatacaataccaaatgctctgccactgttgagctccaaggatggaaaggaggagaacatttcttcctgtattaattggatagatggaggctacagagcttaggctaaactaaaggcatccttgtcttttgagttgttcctctcagtaggaaaaaaaaaaaaatctaatggaaga

SEQ ID NO: 1689 - DNA, 425 bp, Bos taurus
  Clone ID: 53-LIB2809-026-Q1-E1-F2
gcggatcccgcgcccatagttgatgatgaccaagacgtcgggacatcaagctcattggaggatgtggctccaacacaatcccctctgacgacaaacggccttgtgacttgacatcttgaactttcgtccaaattaccaggtacttttggtcgattcccacctttgtgtgtctcatttgattaaacaacactcggaaggctgttcgtgaacaactgacgtggcgactcaacccctccgtattcatgcacgggcacttgtacatgtcccagggatgagtgcgaaacctcgggactgtgttcctctgatcactccaagagggaagagtcgacccttggtcctcccgtccggggtccttgtggtcggtccggtggtccgtcccgtcttgtcacacgtgacgccccgatgtccggttcaacgttctcttg

SEQ ID NO: 1690 - DNA, 389 bp, Bos taurus
  unsure (364): Clone ID: 54-LIB2809-004-Q1-E1-F6
acaccctggcaccctccagggggctggggccaccttctgagtgaggcactttggaacctgcctttgcttcttgtgcttcccagtgaaggctaggcaccccctgcttctgcaagcctcgcactgtccgctgggagcactgactcagggtaggcagcttatccagtaagccgggggcatccagcatgctctctggttctgacccagacagaggagactaaaaacaaatcctcttttgctccatggctggctctggcacaacatgagcattcggcttggccgtgcctcatgagtgcgaatgcctgtgcccaggatgtttctagcaggctttgccagccttgtctggagtcatcagtgtggtaaggancacaaggatatagatggagactctg

SEQ ID NO: 1691 - DNA, 277 bp, Bos taurus
  Clone ID: 54-LIB2809-010-Q1-E1-F10
gctttatgtttgacccagctctggctcctaaaattctttcttttttgggaggcagctatgctcaccaccataccaccaatgtatctctttttgaagtctcaaaatgctgtagcgatcttcttactatgaggggagctgaccaatatccccaagatggcagagtagaaagatgaaagacttttgacaattccttgagctgctggaatcagcacttttgggaattaaccaacctcaaaatttcttgttatctagaataggaattcttccggttgtgaag

SEQ ID NO: 1692 - DNA, 416 bp, Bos taurus
  Clone ID: 54-LIB2809-013-Q1-E1-F6
acccatgtatatatagctttatgtttgacccaactctggctcctaaaattctttcttttttgggaggcagctatgctcaccaccataccaccaatgtatctctttttgaagtctcaaaatgctgtagccatcttcttactatgaggggagctgaccaatatccccaagatggcagagtagaaagatgaaagaattttgacaatttcctgagctgctggaatcagcaattctggaaataaccaacctcaagatttcttgttatctagaataagaaatcttcctgttgtgaaagaaagaaaacaattcgtctgcagcagagaccacttttaccacaaactaaatgcttcttctttatcctaagcctaaagtatatcaggacattgagatttgcttttgagttttaggactgccctgct

SEQ ID NO: 1693 - DNA, 439 bp, Bos taurus
  Clone ID: 54-LIB2809-014-Q1-E1-F6
acccatgtaaatatagctttatgtttgacccaactctggctcctaaaattctttcttttttgggaggcagctatgctcaccaccataccaccaatgtatctctttttgaagtctcaaaatgctgtagccatcttcttactatgaggggagctgaccaatatccccaagatggcagagtagaaagatgaaagaattttgacaatttcctgagctgctggaatcagcaattctggaaataaccaacctcaagatttcttgttatctagaataagaaatcttcctgttgtgaaagaaagaaaacaattcgtctgcagcagagaccacttttaccacaaactaaatgcttcttctttatcctaagcctaaagtatatcaggacattgagatttgcttttgagttttaggactgccctgctccacagatatttcccagagtcag

SEQ ID NO: 1694 - DNA, 385 bp, Bos taurus
  Clone ID: 54-LIB2809-019-Q1-E1-F6
gataacccaatctccctccatggggctggggccaccttcagagtgaggcactttggaacctgcctttgcttcttgtgcatcccattgaatgctaagcatcccctgcttctgcaagcctcgcactgtccgctgggagcactgactcagggtaggcagcttatccagtaaaccgggggcatccagcatgctctctggttctgacccatacataggagactacaaacaaatcctcttttgctccatggctggctctggcacaacatgagcattctgcttggccgtgcctcatgagtgcgaatgcctgtgcacaggatgtttctatcatgctttgccagccttgtctggagtcatcaatgtggtaaggaccataatgatatagatggaa

SEQ ID NO: 1695 - DNA, 363 bp, Bos taurus
  Clone ID: 54-LIB2809-023-Q1-E1-F6
cccgggatacgaatgactgtgcccaggatgtttctagcaggctttgccagccttgtctggagtcatcagtgtggtaaggagcacaaggatatagatggagactctggaggccaagtgaaagtggcagcttgctcaactttgtaaagagaaacagtggttcagtgaccctgaccattctgtcagtaagagagggaacgacttggaccgcagtagccatcactgcctctgaatacacacagaagaggcttgcctgtccagaaaaagaaggaaacgtcaaggagataaaaccagcaggagaaagtggacaaagatggcagagccaagaattgatagggtagttgagagattcctaccccatccccc

SEQ ID NO: 1696 - DNA, 390 bp, Bos taurus
  Clone ID: 54-LIB2809-029-Q1-E1-F10
acattgattggaatattaaagtaattctcttagagtatttccctctgaaagagagggggcttgaagaagaggaagaattagccaggttgcctcctttcctctcgctgctggacaggagatggagaggttgaggggcagggtctgtaggcagttcctaagagatagggttacaaaagaaaggctctgagatcacattgctgggggattcagaaggttactgagtaagttgttgggtgtcctgatatagaagctggttatacaaacaagttagatgttgggttcatttcattaattccactttctccttggattgagaaagcattagaaggcttctccccacggtgttgaaccctttcactcattccttctattaccttctagcggaaaata

SEQ ID NO: 1697 - DNA, 399 bp, Bos taurus
  Clone ID: 54-LIB2809-031-Q1-E1-F10
acccatatatatatagctttatgtttgacccaactctggctcctaaaattctttctttttttgggaggcagctatgctcaccaccataccaccactgtatctctttttgaagtctcaaaatgctgtacccatcttcttactatgaggggagctgaccaatatccccaagatggcagagtagaaagatgaaagacttttgaccatttcctgagctgctggaatcagcaattctggaaataaccaacctcaagatttcttgttatctacaataagagatcttcctgttgtgagagaaagaaaacagttcgtctgcagcagagaccacttttaccacatactaaatgcttcttctttatccataagcctaacgtatatcaggagattgagatttgcttttga

SEQ ID NO: 1698 - DNA, 437 bp, Bos taurus
  Clone ID: 55-LIB2809-002-Q1-E1-F4
tggccgcgggatacccatgtatatatagctttatgtttgacccaactctggctcctaaaattctttcttttttgggaagcagctatgctcaccaccataccaccaatgtatctctttttgaagtctcaaaatgctgtagccatcttcttactatgaggggagctgaccaatatccccaagatggcagagtagaaagatgaaagaattttgacaatttcctgagctgctggaatcagcaattctggaaataaccaacctcaagatttcttgttatctagaataagaaatcttcctgttgtgaaagaaagaaaacaattcgtctgcagcagagaccacttttaccacaaactaaatgcttcttctttatcctaagcctaaagtatatcaggacattgagatttgcttttgagttttaagactgccctgctccacaaata

SEQ ID NO: 1699 - DNA, 356 bp, Bos taurus
  unsure (21),(355): unsure at all n locations; Clone ID: 55-LIB2809-003-Q1-E1-F4
aagaccttgactgaggcttangatgtgagatgccatgaactttgctgaacagtgtctctgttcagcaaactaaccagcattccccacaacacagtctatggcagacgatagtatagaggagtgttggaagaaccttgggtccctttgtccctgtaacctcagttgtctaagcagaaacctggctttattctatttaaaggttgaaaatatacaataccaaatgctctgccactgttgagctccaaagatggaaaggaggagaacatttcttcctgtattaattggatagatggaggctacagagcttatgctaaactaaaggcatccttgtcttttgagttgttcctctcagtang

SEQ ID NO: 1700 - DNA, 199 bp, Bos taurus
  Clone ID: 55-LIB2809-007-Q1-E1-F12
ggacgcgggataatcgtacacggccctgtccccgtgccggggaggaacggggcttcgctgacacttgaggaggacaagattttcacgctgatcgcatgccctgaggagtcactgacgtgcgacttgattctacgggtttaaatgcattttcctccccgatgtttgatttaaactttgcttccctttgactcattggcct

SEQ ID NO: 1701 - DNA, 356 bp, Bos taurus
  Clone ID: 55-LIB2809-012-Q1-E1-F4
gccatagccgcgggagaccctgggcacaacgacaccatccagccttgtgtagggtcatggtagagatcagatccacggaacacaattagaatagaaagataagttggttttgatcatcagttgtaaagcatgcatctgatgacctgtggaattaacactaccccacaggcatttccaagcggtacgtgcttggtcagaggatctaatctacagtgatcttccattagattttttttttttccgactgagaggaacaactcaaaagacaaggatgcctttagttgagcctaagctctgtagcctccatcgatccacgtgggacaggaagaaatgttctcctccttgccatccttgga

SEQ ID NO: 1702 - DNA, 350 bp, Bos taurus
  unsure (93),(323): unsure at all n locations; Clone ID: 55-LIB2809-013-Q1-E1-F4
acaccctggatccctccagggggctggggccaccttctgagtgaggcactttggaacctgcctttgctccttgtgcttcccagtgaaggctangcaccccctgcttctgcaagcctcgcactgtccgctgggagcactgactcagggtaggcagcttatccagtaagccgggggcatccagcatgctctctggttctgacccagacagaggagactaaaaacaaatcctcttttgctccatggctggctctggcacaacatgagcattcggcttggccgtgcctcatgagtgcgaatgcctgtgcccaggatgtttctagcangctttgccagccttgtctggagtcatc

SEQ ID NO: 1703 - DNA, 377 bp, Bos taurus
  Clone ID: 55-LIB2809-025-Q1-E1-F12
caaccaaccctggggaagggccagggaaaaattaaattcaacggacaacatttagataaaaagaaaagttgggtttggtcaacaattggtaaaccagcaccgaagaccgttggaattaaaactaaccccacaggcattttcaagcggtaggtgcttggtcagaggatctaatctacagtgatcttccattagatttttttttttcctactgagaggaacaactcaaaagacaaggatgcctttagtttagcctaagctctgtagcctccatctatccaattaatacaggaagaaatgttctcctcctttccatccttggagctcaacagtggcagagcatttggtattgtatattttcaacctttaaatagaataaa

SEQ ID NO: 1704 - DNA, 405 bp, Bos taurus
  Clone ID: 55-LIB2809-028-Q1-E1-F4
ctttatgtttgacccaactctggctcctaaaattctttcttttttgggaggcagctatgctcaccaccataccaccaatgtatctctttttgaagtctcaaaatgctgtagccatcttcttactatgaggggagctgaccaatatccccaagatggcagagtagaaagatgaaagaattttgacaatttcctgagctgctggaatcagcaattctggaaataaccaacctcaagatttcttgttatctagaataagaaatcttcctgttgtgaaagaaagaaaacaattcgtctgcagcagagaccacttttaccacaaactaaatgcttcttccttatcctaagcctaaagtatatcaggacattgagatttgcctttgagttttaggactgccctggctcaca

SEQ ID NO: 1705 - DNA, 132 bp, Bos taurus
  Clone ID: 55-LIB2809-029-Q1-E1-F4
ggcatatcccgggatttcaacgtttcaaacgggtcaaaaacctttcccggatgccccgaccataaggaaatttgggcgtgataaaggcgtgcattgttaagtattagagtaataacagcagcctaaccaggt

SEQ ID NO: 1706 - DNA, 415 bp, Bos taurus
  Clone ID: 55-LIB2809-030-Q1-E1-F12
cacaccctagctccatccagggggctggggccaccttctgagtgaggcactttggaacctgcctttgcttcttgtgcttcccagtgaaggctaggcaccccctgcttctgcaagcctcgcactgtccgctgggagcactgactcagggtaggcagcttatccagtaagccgggggcatccagcatgctctctggttctgacccagacagaggagactaaaaacaaatcctcttttgctccatggctggctctggcacaacatgagcattcggcttggccgtgcctcatgagtgcgaatgcctgtgcccaggatgtttctagcaggctttgccagccttgtctggagtcatcagtgtggtaaggagcacaaggatatagatggagactctggaggccaagtgaaagtggcagcttg

SEQ ID NO: 1707 - DNA, 429 bp, Bos taurus
  Clone ID: 55-LIB2809-026-Q1-E1-F4
gataaacgatgttgggaacttcatggctctcttactcactccgatcaactattgacatatacatattatggtagttaaccctcatcttcaacaacatcaaagaattggtcatactcacgaacatataaccggagcccttgatgcatgaaccagactccgtgacgacgatcatcaacatcccattcaacaccaccaccagcagcagcatcaaattcatcatcatcagagcatttgtcagtcccatgtaatacactcttgtcgacggcgggtagatcttgctcgtaatctatacgctcatcaagttttcggagatattttcgggcctttcaaacacttagtttctgagcatcaatcccttcttaaacaatgacccatgccccttttaccacgaattcgtcaaccttcgatgaacccctcattggataggta

SEQ ID NO: 1708 - DNA, 451 bp, Bos taurus
  Clone ID: 56-LIB2809-005-Q1-E1-F8
accgcaagaccttgactgaggcttaggatgtgagatgccatgaactttgctgaacagtgtctctgttcagcaaactaaccagcattccccacaacacagtctagggcagacgatagtatacaggagtgttggaagaaccttgggtccctttgtccctgtaacctcagttgtctaggcagaaacctggctttattctatttaaaggttgaaaatatacaataccaaatgctctgccactgttgagctccaaggatggaaaggaggagaacatttcttcctgtattaattggatagatggaggctacagagcttaggctaaactaaaggcatccttgtcttttgagttgttcctctcagtaggaaaaaaaacaaatctaatggaagatcactgtagattagatcctctgaccaagcacctaccgcttggaaatgcctgtggggtagttttaat

SEQ ID NO: 1709 - DNA, 401 bp, Bos taurus
  Clone ID: 56-LIB2809-006-Q1-E1-F8
acccatgaatatatagctttatgtttgacccaactctggctcctaaaattctttcttttttgggaggcagctatgctcaccaccataccaccaatgtatctctttttgaagtctcaaaatgctgtagccatcttcttactatgaggggagctgaccaatatccccaagatggcagagtagaaagatgaaagaattttgacaatttcctgagctgctggaatcagcaattctggaaataaccaacctcaagatttcttgttatctagaataagaaatcttcctgttgtgaaagaaagaaaacaattcgtctgcggcagagaccacttttaccacaaactaaatgcttcttctttatcctaagcctaaagtatatcaggacattgagatttgcttttgagttt

SEQ ID NO: 1710 - DNA, 409 bp, Bos taurus
  Clone ID: 56-LIB2809-008-Q1-E1-F8
gggatacttacagaaccacgccctgggcatggcactgctccacaactcaggggacctggtgggggtgcggggcagacaacctctggagcttcccattggacccagctgtagaagctcagggctttctacctggcaggtcttggagtgacctgttccggaggcggtttagagcttgggccttggggtcagagttcaagccgtggtctcgtgcaagtgacttcacccctctgtgccttttcaaagtggaactgatcacagtgcctcccttctagtggtggtgcgagaatccgaaacaggaggtatgagaaatgctgagtgcagtgcctggcatagagtaaacattcaagaaataactgcaatgaacgtgatcccgccttcccaggaccctctcaagcccaagcgtccatct

SEQ ID NO: 1711 - DNA, 358 bp, Bos taurus
  unsure (296): Clone ID: 56-LIB2809-009-Q1-E1-F8
gcatgaaccaatccgcgatgggcgcgggataccgcaggaccttgactgaggcttaggatgtgagatgccatgaactttgctgaacagtgtctctgttcagcaaactaaccagcattccccagaacacagtctagggcagacgatagtatagaggagtgttggaagaaccttgggtccctttgtccctgtaacctcagttgtctaggcagaaacctggctttattctatttaaaggttgaaaatatacaataccaaatgctctgccactgttgagctccaaggatggaaaggagganaacatttcttcctgtattaattggatagatggaggctacagagcttaggctaaactaaaggc

SEQ ID NO: 1712 - DNA, 391 bp, Bos taurus
  Clone ID: 56-LIB2809-012-Q1-E1-F12
acaccctggatccctccagggggctggggccaccttctgagtgaggcactttggaacctgcctttgcttcttgtgcttcccagtgaaggctaggcaccccctgcttctgcaagcctcgcactgtccgctgggagcactgactcagggtaggcagcttatccagtaagccgggggcatccagcatgctctctggttctgacccagacagaggagactaaaaacaaatcctcttttgctccatggctggctctggcacaacatgagcattcggcttggccgtgcctcatgagtgcgaatgcctgtgcccaggatgtttctagcaggctttgccagccttgtctggagtcatcagtgtggtaaggagcacaaggatatagatggagactctgga

SEQ ID NO: 1713 - DNA, 100 bp, Bos taurus
  Clone ID: 56-LIB2809-014-Q1-E1-F8
ggataccggctgacgggctccagaggtggcagcgacatggtgtgggcattctggaagtcctctgtcttggtgtcctcccatgaggctccttctttcttgt

SEQ ID NO: 1714 - DNA, 405 bp, Bos taurus
  Clone ID: 56-LIB2809-016-Q1-E1-F8
acacagaaggttggttccagtcattttgtcctattaagccaagtaagttgactataatgtcataatgaaaataaatttcctagatttatggaccagtgtgtaatgtatttaataggaggtttgggtaataacgataagatggataggataggtgggaaatacttaccttctttctttctttaggtgcctttaagagatcattaagggtagaatctagttttccaggaaaaaagttcttaaaatgatttcaagtctgtaaatcattagaaatacggtgtgtctgtattgttggaaatagtgttgaggcagctgagatgaaatgcagtgatcacccttgggctgatcttggggaatgggtagcccaggggaggcaggacctgcctcgatgacctagttacatacagt

SEQ ID NO: 1715 - DNA, 400 bp, Bos taurus
  Clone ID: 56-LIB2809-018-Q1-E1-F12
actttgattggaatattaaagtaattctcttagagtatttccctctgaaagagagggggcttgaagaagaggaagaattagccaggttgcctcctttcctctcgctgctggacaggagatggagaggttgaggggcagggtctgtaggcagttcctaagagatagggttacaaaagaaaggctctgagatcacattgctgggggattcagaaggttactgagtaagttgttgggtgtcctgatatagaagctggttatacaaacaagttagatgttgggttcatttcattaattccactttctccttggattgagaaagcattagaaggcttctccccacggtgttgaaccctttcactcattccttctattaccttctagcggaaaatacaagactggc

SEQ ID NO: 1716 - DNA, 428 bp, Bos taurus
  Clone ID: 56-LIB2809-019-Q1-E1-F8
acacatatatatatagctttatgtttgacccaactctggctcctaaaattctttctttttttgggaggcagctatgctcaccaccataccaccaatgtatctctttttgaagtctcaaaatgctgtagccatcttcttactatgaggggagctgaccaatatccccaagatggcagagtagaaagatgaaagaattttgacaatttcctgagctgctggaatcagcaattctggaaataaccaacctcaagatttcttgttatctagaataagaaatcttcctgttgtgaaagaaagaaaacaattcgtctgcagcagagaccacttttaccacaaactaaatgcttcttctttatcctaagcctaaagtatatcaggaaattgacaatttgctttggagttttaggactgccctgctccacagatat

SEQ ID NO: 1717 - DNA, 245 bp, Bos taurus
  Clone ID: 56-LIB2809-023-Q1-E1-F8
tgcccaaagtgtgtctatcatgggttctgattcttaatctgtatcatcactgggatggttaggggaacgctaaatttggtttctcaggatgcttcattgagttggcagcttccttagcgttggacagggactgggagcattgctgaatctatccactctctcagtattagatgaaactcccttggtctcaatggacatctatgtttctcaatggttcaactaaatgccttgctgtcgtgcaagtc

SEQ ID NO: 1718 - DNA, 373 bp, Bos taurus
  Clone ID: 56-LIB2809-026-Q1-E1-F12
acaaaccagtgccggtgaaaaccaggagtaagcgggtccagttcagggcgctcgccaagatggtcttggacatgctaaaggagcagtctgagaaagctgctagaaaactgtccagtgcaactttagcttccagtccaaaccgggcctcatctcacaaagactccttcaagaagccagcttctcccacaagcagccggaagacatctccagggcctggtgcaaagaacagagccaaggtgtggtccccaggcccccatgggaagaggaaagggatccccaaacgccccagtggcatagccaggcaagccgcacagcacagacgagctggcataagtctccctccatctcctccgtcaaggtggccgctcatggg

SEQ ID NO: 1719 - DNA, 284 bp, Bos taurus
  Clone ID: 56-LIB2809-026-Q1-E1-F8
ggtttcgttgttctcgttgggattcaaccgtaccccagggggtcgttgtcgaacggtgggagtctgtcttcccacgagtcagtgcccctaccgaggttatggattaacggcccccgatagaggatcgggtggcgctgtcagggacagagaacacagtaaaaagatatggcgctttcgtggatccgtccgtgtccgagaagatcacgattgccgttccggctcgctgatccctcgcaatcggtctcgggatcatctttgtacgaacgtttcggacggttctgtcc

SEQ ID NO: 1720 - DNA, 85 bp, Bos taurus
  Clone ID: 57-LIB2809-002-Q1-E1-G10
tgggcccgggctacccctgtaaggaaagctttatgtttgctcccactctatctccgatagttctctctttattgggctgcacctt

SEQ ID NO: 1721 - DNA, 392 bp, Bos taurus
  unsure (221): Clone ID: 57-LIB2809-008-Q1-E1-G10
ggcatactacctactttattacagagaaaagtaggtctgtggttcaggggaggagacccagtctgcctggagggccaccggagcaggcgcactggggaccgaagggctcctctctgcagctcgtctgtccttgactgtcctctagagcgctcgtccctcagtctgacttccgtcaacacagtgcacaagttaagaatgttttctcaggagggcgagagtcncctggaggaggcactgacttcccgctctcagggatcactgaggtctgtgtgtggaggctgctgggacactgttccttacacgggagacactgcatcaaaaaggaaaactgaagttgaaattaacctgtgttgcttataaaatgtgagacagaaagcacaagtttttaactg

SEQ ID NO: 1722 - DNA, 310 bp, Bos taurus
  unsure (56),(305): unsure at all n locations; Clone ID: 57-LIB2809-008-Q1-E1-G2
ctgggaaatggtttgttcctcagactggaaatgccacaacctgagcttacactcancgcggtccctggtatgttttctcgtcaccctcactgacttcagagacttcagacttgtggtcctttctctgttactagttctacacacctcacgctacttccttcctcttaagaggaatttcttgaatttcttaggactttctcattttgaaagagtgtagcttcatattgcttattattgggtccttttgtttgctttttaactcgactcacactctgtcttcccctggaaggcatgcatttcagtantatag

SEQ ID NO: 1723 - DNA, 312 bp, Bos taurus
  Clone ID: 57-LIB2809-009-Q1-E1-G2
cccatgtatatatagctttatgtttgacccaactctggctcctaaaattctttcttttttgggaggcagctatgctcaccaccataccaccaatgtatctctttttgaagtctcaaaatgctgtagccatcttcttactatgaggggagctgaccaatatccccaagatggcagagtagaaagatgaaagaattttgacaatttcctgagctgctggaatcagcaattctggaaatgaacaacctcaagatttcttgttatctagaataagaaatcttcctgttgtgaaagaaagaaaacaattcgtctgca

SEQ ID NO: 1724 - DNA, 328 bp, Bos taurus
  Clone ID: 57-LIB2809-011-Q1-E1-G10
taaagcctgatttatgtttgacccctctctggctcccaaaattctctctttttttgggaggcatttatgctcacaaccggacaacaaaggtagccctttttgcattcccaaaatgcggaaacgctcttcttactagtaggggagctgagcagcatcaccaatatggcggagtcaactgctaaaccaattttgaccattgcctgacctgcagaaatcagcacttctggaaatatccagactcaaaattccttgtgacctagaacaataaatctccccgttttgaagaatccaaatcaattcgtctgcagcatagagcacttttacaaca

SEQ ID NO: 1725 - DNA, 421 bp, Bos taurus
  Clone ID: 57-LIB2809-016-Q1-E1-G2
tgggcccgggataccctgggcccaaggacaccatccagccttgtgtagggtcatggtatagatcagatccacggaacacaattagaatagaaagataagttggttttgatcatcagttgtaaagcatgcatctgatgacctgtggaattaaaactaccccacaggcatttccaagcggtaggtgcttggtcagaggatctaatctacagtgatcttccattagatttttttttttcctactgagaggaacaactcaaaagacaaggatgcctttagtttagcctaagctctgtagcctccatctatccaattaatacaggaagaaatgttctcctcctttccatccttggagctcaacagtggcagagcatttggtattgtatattttcaacctttaaatagaataaagccaggtttctgc

SEQ ID NO: 1726 - DNA, 69 bp, Bos taurus
  Clone ID: 57-LIB2809-020-Q1-E1-G10
tgtcgtccctgctcggtccccggttcctgtctgggggccgtgctttttcctcctcccgggttttgtttt

SEQ ID NO: 1727 - DNA, 386 bp, Bos taurus
  unsure (358): Clone ID: 57-LIB2809-022-Q1-E1-G10
tgggccgggctactggtgcatcctgagagagatgacataggattagagttgcttccctgtttcagtccatgccctcatttgcccactgaacacttgggtttgggacatgaccttcaggtcccttcagggctccaagggctctttgcagtctaggggcacagcctgaggctgacctgggccctctcgcatctgcctggtggtcgcaggaagttgcctccacccagaagcaaagatggtcctcggtcccagacagctggacaagggaagtgttgtgggtcagcactggccctcagcactcctggatgggggcagggagggtgggcaaaactttggaaagccaagcacggggtaatcctgngttccaggcaggatcttactcattggat

SEQ ID NO: 1728 - DNA, 395 bp, Bos taurus
  unsure (219),(263),(275): unsure at all n locations; Clone ID: 57-LIB2809-023-Q1-E1-G2
gctgaatcaagcggctcagggccaggctgccctagtcagtgtgggtagaggccagtccagtgaagcagagacctcaaggtgagccaaggaagtcagattccttattccatccactccagtctgcctcaacccagagggagagattcattcagtgtaaggctggtccccagccaaaggacttccatgcctgggttccgggcttaggacacatgggactangatatctataggagcctgcaagtcacagcatcagtgaggtgcanggcagccacgangggattcctgggccaagggatgttgagaagggcccactggctcctccctcctccttccaggctgactctggcatctccttaagggcctcaaaggggggggggggggcccccccccccccc

SEQ ID NO: 1729 - DNA, 432 bp, Bos taurus
  unsure (173): Clone ID: 57-LIB2809-024-Q1-E1-G2
atgctccaactaccatgggccgccgatactttggatgaaatattaaagtaattctcttagagtatttccctctgaaaaaaagggggcttgaagaaaagaagaatttaccaggttgcctcctttcctctcgctgctggacaggagatggagaggttgaggggcacggtctgtangcagttcctaagagatagggttacaaaagaaaggctctgagatcacattgctgggggattcagaaggttactgagtaagttgttgggtgtcctgatatagaagctggttatacaaacaagttagatgttgggttcatttcattaattccactttctccttggattgagaaagcattagaaggcttctccccacggtgttgaaccctttcactcattccttctattaccttctagcggaaaatacaggactggctggggg

SEQ ID NO: 1730 - DNA, 327 bp, Bos taurus
  Clone ID: 57-LIB2809-026-Q1-E1-G2
cccataagatctatatatacgtttatctttcagcgaagtgtccgtggtaaaattgtttgtttttcccaccgacgtatcgtgaggaggataggaggaatctatgcgtttttcaactgtgaaaatcgtctacggatgttgttagtatcaccccacgtcaggaatatggggaacatccgacactacaaacatgcaacaattttcagaatttggtcacgtcgtccaatgacgaattgtccaaataaggaacgtgaacatttgctcttatgtacaataacaaatgttggtcttctcaaacaaacaaaagaattgctgtcgacgacacaggag

SEQ ID NO: 1731 - DNA, 439 bp, Bos taurus
  Clone ID: 58-LIB2809-001-Q1-E1-G10
gccatgggcgcgggataccctgggcccaaggacaccatccagccttgtgtagggtcatggtatagatcagatccacggaacacaattagaatagaaagataagttggttttgatcatcagttgtaaagcatgcatctgatgacctgtggaattaaaactaccccacaggcatttccaagcggtaggtgcttggtcagaggatctaatctacagtgatcttccattagattttttttttttttcctactgagaggaacaactcaaaagacaaggatgcctttagtttagcctaagctctgtagcctccatctatccaattaatacaggaagaaatgttctcctcctttccatccttggagctcaacagtggcagagcatttggtattgtatattttcaacctttaaatagaataaagccaggtttctgcctagacaactg

SEQ ID NO: 1732 - DNA, 483 bp, Bos taurus
  Clone ID: 58-LIB2809-003-Q1-E1-G6
accctgggcccaaggacaccatccagccttgtgtagggtcatggtatagatcagatccacggaacacaattagaatagaaagataagttggttttgatcatcagttgtaaagcatgcatctgatgacctgtggaattaaaactaccccacaggcatttccaagcggtaggtgcttggtcagaggatctaatctacagtgatcttccattagattttttttttttcctactgagaggaacaactcaaaagacaaggatgcctttagtttagcctaagctctgtagcctccatctatccaattaatacaggaagaaatgttctcctcctttccatccttggagctcaacagtggcagagcatttggtattgtatattttcaacctttaaatagaataaagccaggtttctgcctagacaactgaggttacagggacaaagggacccaaggttcttccaacactcctctatactatcgtctgccct

SEQ ID NO: 1733 - DNA, 428 bp, Bos taurus
  Clone ID: 58-LIB2809-005-Q1-E1-G6
acatatctttcattttcagatacaagcagcaattttggcatttcttatcacaaaaaatccgtatgagaaaggtggcatgcccagtgaacttcctgggtggagaggtttttctgtcaaagctggcagggtttgttcatccaccatcttcagaatttggtcattgagctggacagatttagaaagtaagccatcgggtcctgaaggttttatgaggtatttatccacttgcttgttaaataagtgatgtggtaactccaagtgcttggtgacattatggaggtttaaggcatagagagttaaatctccttctttataccttgggtgtttggtgtttgtgcaatgaagatatactcgaagtttgcttctgtctggacctttcaaaattgccaattaacactttgttgcccaccagtttcttgaacagaaga

SEQ ID NO: 1734 - DNA, 425 bp, Bos taurus
  Clone ID: 58-LIB2809-009-Q1-E1-G10
ctggccgcgggatacaggttctagagagaggatgtggggagacgactggcaggtgttgctcatagaagactctggaacaacagccagtcagacgtagtgacacttaaatacgagggtcagttctcatctgcacacacctctgcattttttcccctgcttaaacacacacattcatacaggaggacatgttatagtggtgaacatttggttctcaaccttccgaagagcttggaagagtcctctgaattatttcctgaaatactggaattgtctcatggagaaatcttccagtgaagggaagggggagttaaaaatatccttaactatttaacttagattaatatgcctgctgaggcaaaagcaagtcactgctctctttgttcaaggatcagagaaagtggtggctacaggctctacgttttcac

SEQ ID NO: 1735 - DNA, 396 bp, Bos taurus
  Clone ID: 58-LIB2809-009-Q1-E1-G6
gggatacccatgtatatatagctttatgtttgacccaactctggctcctaaaattctttctttttttgggaggcagctatgctcaccaccataccaccaatgtatctctttttgaagtctcaaaatgctgtagccatcttcttactatgaggggagctgaccaatatccccaagatggcagagtagaaagatgaaagaattttgacaatttcctgagctgctggaatcagcaattctggaaataaccaacctcaagatttcttgttatctagaataagaaatcttcctgttgtgaaagaaagaaaacaattcgtctgcagcagagaccacttttaccacagagtaaatgcttcgtctttatgctaagcctaaagtatatcaggacattgagatttg

SEQ ID NO: 1736 - DNA, 445 bp, Bos taurus
  Clone ID: 58-LIB2809-010-Q1-E1-G6
catgagccccaccgcgatgggcgcgggatacccatgtatatatagctttatgtttgacccaactctggctcctaaaattctttcttttttgggaggcagctatgctcaccaccataccaccaatgtatctctttttgaagtctcaaaatgctgtagccatcttcttactatgaggggagctgaccaatatccccaagatggcagagtagaaagatgaaagaattttgacaatttcctgagctgctggaatcagcaattctggaaataaccaacctcaagatttcttgttatctagaataagaaatcttcctgttgtgaaagaaagaaaacaattcgtctgcagcagagaccacttttaccacaaactaaatgcttcttctttatcctaagcctaaagtatatcaggacattgagatttgcttttgagttttaagactgccctgct

SEQ ID NO: 1737 - DNA, 428 bp, Bos taurus
  Clone ID: 58-LIB2809-012-Q1-E1-G6
acccatgtatatatagctttatgtttgacccaactctggctcctaaaattctttcttttttgggaggcagctatgctcaccaccataccaccaatgtatctctttttgaagtctcaaaatgctgtagccatcgtcttactatgaggggagctgaccaagatccccaagatggcagagtagaaagatgaaagaattttgacaatttcctgagctgctggaagcagcagttctggaaataaccaacctcaagatttcttgttatctagaataagaaatcttcctgttgtgaaagacggaaaacaattcgtctgcagcagagaccacttttaccacaaactaaatgcttcttcttgagcctaagcctaaagtagatcaggacattgagatttgcttttgagttttaggactgccctgctccacagatattt

SEQ ID NO: 1738 - DNA, 395 bp, Bos taurus
  Clone ID: 58-LIB2809-026-Q1-E1-G6
aaacccgaattgaataactatatttacaacggaacgtactagtagtcacaaattagactaattaatgacttgaattgaatttaatacgtgactggcccggcagtggttcgcaagggatcaatgcgacgaaaagaacggtgggtctgtatgaggaagtgggccactttagggaaagtgatctggatgcaatgcctcatcggatggacggatgtgatggtggctcgcggggttgtggtggacgggggagtgggtgggacgacgaccctgtttgggaatcactgaactgttgcgatcacctccggaaaatattccacttagactctttattacacattgaataccttcaaaattgacactggtgactttgagacaaatcagatctcagtcaaaagatc

SEQ ID NO: 1739 - DNA, 309 bp, Bos taurus
  Clone ID: 59-LIB2809-002-Q1-E1-G12
actcctgccacgtggagcacagaagcctgacccggcccctcaccgtcccgtgggacccgcggcaacaagccgagtagtcaccctttctgtgccatgagagaggtgggcgctccgagctgctgtcaacgtcgtgggccaggcccaggggatggcggtggattccaggtggtggatttgggagggaagacttgaatgccgagtgctgagccgactcacagccaaccagccttgcaaaaaacccattatgtaatctgcgaaatcaaatcagcatcatcgccttatagaatgattatttttaaactgcaaagt

SEQ ID NO: 1740 - DNA, 404 bp, Bos taurus
  Clone ID: 59-LIB2809-005-Q1-E1-G12
gatactggtccccaggctcggcaaagggaggcagctgcccgcctgctgaaggtgctcacagacctggaccaagcccacgaggagttccagcagcaggaacaggggaaggtggtttcgggccccctgaggccctaaggagatgccagagtcagcctggaaggaggagggaggagccagtgggcccttctcaacatcccctggcccaggaatcccctcgtggctgccctgcacctcactgatgctgtgacttgcaggctcctatagatatcctagtcccatgtgtcctaagcccggaacccaggcatggaagtcctttggctggggaccagccttgcactgaatgaatctctccctctgggttgaggcagactggagtggatggaataaggaatctgacttccttg

SEQ ID NO: 1741 - DNA, 460 bp, Bos taurus
  Clone ID: 59-LIB2809-005-Q1-E1-G4
atggccgccggatacccatgtatatatagctttatgtttgacccaactctggctcctaaaattctttcttttttgggaggcagctatgctcaccaccataccaccaatgtatctctttttgaagtctcaaaatgctgtagccatcctcttactatgaggggagctgaccaatatccccaagatggcagagtagaaagatgaaagaattttgacaatttcctgagctgctggaatcagcaattctggaaataaccaacctcaagatttcttgttatctagaataagaaatcttcctgttgtgaaagaaagaaaacaattcgtctgcagcagagaccacttttaccacaaactaaatgcttcttctttatcctaagcctaaagtatatcaggacattgagatttgcttttgagttttaggactgccctgctccacagatatttcccagagtcaggagagaaa

SEQ ID NO: 1742 - DNA, 372 bp, Bos taurus
  Clone ID: 59-LIB2809-008-Q1-E1-G4
attgggtattaaagctggaattgaagaaggggatggtctttcttggcaataataagatttgaataagtcaaaaatgggtccaagctgtggggaaggccccgaaaatcgagaaggtaaaggattaggatttgttgatatgacatgggagtgtttaaagcaatgaaaggtgattgagttatttagagtctcgaggttatggtgggaaaagattcagagttcagacagatttacagagggtgtgactctgcattctggtagtgaagccttgagctgaagtgtgaagatcgtgtcagcgtgtgtggcattcgggagtgctcttcatgtctgagaggactgaaggaggagctagcgggagcagagagagtgtggaaa

SEQ ID NO: 1743 - DNA, 399 bp, Bos taurus
  unsure (289),(342): unsure at all n locations; Clone ID: 59-LIB2809-013-Q1-E1-G12
aggctaaggatttaaaatccaagaaacttggctaaaaattgtcccggttaaccaaactaaccaccattcccaaaaaaaaattcaagggcaaacaatattataaaggatttttggaaaaaccttgggtccctttgtcccggtaacctcatttgtcaaggcaaaaacctggctttattcaatttaaaggttgaaaatatacattaccaaatgctctgccactgttaagctcaaaggatggaaaggaggaaaacatttcttcctgtattaattggatacatggaggctacanagcttaggctaaactaaaggcatccttgtcttttgagtagttcctctcagtangaaaaaaaaaaaatctaatggaagatcactgtagattagattctcctgacaagcacc

SEQ ID NO: 1744 - DNA, 178 bp, Bos taurus
  Clone ID: 59-LIB2809-020-Q1-E1-G12
cctcttagacacaatccgttcctgccctttcccctcatcgacacagcccctcttacctgtcagctatgagcatgtgagacacttgtatatacgcactgcactgacaacgtgttgcattcaagagcctgcctatttttcgacgacagtcagtccatgccaggtgtctgagcccccacca

SEQ ID NO: 1745 - DNA, 321 bp, Bos taurus
  Clone ID: 59-LIB2809-020-Q1-E1-G4
gggaaacacttatctttattatgatccagctcaggcttctctcttttacaaaagacctgcttcaaccaagagcagctgctcccatacagtccaacgcagcccaattcaggggaaatggtgtaattgtctgggatttggagaagatttggtgtggcctttttcccttctcggtgctcctcatatcccctggcagggttttcgtaagagagcagtcgtgtccctgagctggcaggtggaggatgagtgtgggaattggggaacatttgagggagatggttcatctctgccacaagagccttgcgtgcttcttaacccagctaa

SEQ ID NO: 1746 - DNA, 205 bp, Bos taurus
  Clone ID: 59-LIB2809-022-Q1-E1-G12
ctgcagcatcgagagtcatatcacatctcgctagggatacgtcactgcttcagtccaaacacgcatgtgcttactgtgcacttgggtttgcgacatcaccttcaggtcccttcaaggtgccagaggctccttgcaatccaggggcatcaactcaggctgacctgggccctcacgcatcagctttcaggactcatgaaattcccgc

SEQ ID NO: 1747 - DNA, 65 bp, Bos taurus
  Clone ID: 59-LIB2809-023-Q1-E1-G4
gatacttatggatggcatattaaagtaattctcttagagtatttccctctgaaagcgacggggct

SEQ ID NO: 1748 - DNA, 387 bp, Bos taurus
  Clone ID: 59-LIB2809-024-Q1-E1-G4
atacccataaatatatagctttatgtttgacccaactctggctcctaaaattctttctttttttgggaggcagctatgctcaccaccataccaccaatgtatctctttttgaagtctcaaaatgctgtagccatcttcttactatgaggggagctgaccaatatccccaagatggcagagtagaaagatgaaagaattttgacaatttcctgagctgctggaatcagcaattctggaaataaccaacctcaagatttcttgttatctagaataagaaatcttcctgttgtgaaagaaagaaaacaattcgtctgcagcagagaccacttttaccacaaactaaatgcttcttctttatcctaagcctaaagtatatcaggacattga

SEQ ID NO: 1749 - DNA, 347 bp, Bos taurus
  unsure (287): Clone ID: 59-LIB2809-027-Q1-E1-G12
acacttacacatgggtttatttatgtctgtttcccactagaatgtgaatgctttagggcttggagcacataacatctcagtgagatgtggagtgattggacagctgcatttcttcgcccgtcttggggagaagggggtcaaaatgtgagctgaagaatccctgtgctggagttgatggaaaatgctatctcctgggccccaacccagcaccaccggatcaggtgctgggcatcacctgggaattcccacctgcccttttccttctagtctcaacccagcagaggcangagagccacagaccccttgcaaagtggggttcgctgccccacttctcatctccagtaaaa

SEQ ID NO: 1750 - DNA, 57 bp, Bos taurus
  Clone ID: 59-LIB2809-027-Q1-E1-G4
ggataaagcaacaaggcctgaatgggcatatctctctggggatattgccttgctcct

SEQ ID NO: 1751 - DNA, 410 bp, Bos taurus
  unsure (77): Clone ID: 59-LIB2809-028-Q1-E1-G4
cagggggctggggccaccttctgagtgaggcactttggaacctgcctttgcttcttgtgcttcccagtgaaggctangcaccccctgcttctgcaagcctcgcactgtccgctgggagcactgactcagggtaggcagcttatccagtaagccggggcgcatccagcatgctctctggttctgacccagacagaggagactaaaaacaaatcctcttttgctccatggctggctctggcacaacatgagcattcggcttggccgtgcctcatgagtgcgaatgcctgtgcccaggatgtttctagcaggctttgccagccttgtccggagtcatcagtgtggtaaagagcacaacgatatagatggagactctggaggccaagtgaaagtggcagcttgctcaactttgt

SEQ ID NO: 1752 - DNA, 289 bp, Bos taurus
  unsure (78),(111): unsure at all n locations; Clone ID: 59-LIB2809-029-Q1-E1-G4
caagggggttggggcaacttccgaattaaggagctttgcaacctgcctttgcttcttgtgcttcgcagtgaaggctangcaccccctgcttctgcaagcctcgcactgtcngctgggagcacggactcagggtaagcagctgatccagtaggccgggggcatccagcatgctctctggttctgacccagacagaggagacgagcaacaaatcctcttttgcgccatggctggctctggcacaacatgagcattcggcttggccgtgcctcatgagtgcgaatgcctgtg

SEQ ID NO: 1753 - DNA, 389 bp, Bos taurus
  Clone ID: 59-LIB2809-030-Q1-E1-G12
gggacaccgcaaaaccttaactgaggcttaggatgtgagatgccatgaactttgctgaacagtgtctctgttcagcaaactaaccagcattccccacaacacagtctagggcagacgatagtatagaggagtgttggaagaaccttgggtccctttgtccctgtaacctcagttgtctaggcagaaacctggctttattctatttaaaggttgaaaatatacaataccaaatgctctgccactgttgagctccaaggatggaaaggaggagaacatttcttcctgtattaattggctagatggaggctacagagcttaggctaaactaaaggcatccttgtcttttgagttgttcctctcagtaggaaaacaaagaatctaatggaaga

SEQ ID NO: 1754 - DNA, 471 bp, Bos taurus
  Clone ID: 59-LIB2809-032-Q1-E1-G12
cgcatggtctctaccgccatgagcgcgggatacccatgtatatatagctttatgtttgacccaactctggctcctaaaattctttcttttttgggaggcagctatgctcaccaccataccaccaatgtatctctttttgaagtctcaaaatgctgtagccatcttcttactatgaggggagctgaccaatatccccaagatggcagagtagaaagatgaaagaattttgacaatttcctgagctgctggaatcagcaattctggaaataaccaacctcaagatttcttgttatctagaataagaaatcttcctgttgtgaaagaaagaaaacaattcgtctgcagcagagaccacttttaccacaaactaaatgcttcttctttatcctaagcctaaagtatatcaggacattgagatttgcttttgagttttaggactgccctgctccacagatatttcccagagtcagg

SEQ ID NO: 1755 - DNA, 297 bp, Bos taurus
  Clone ID: 59-LIB2809-026-Q1-E1-G4
tcccgggcccataagcgtccagagatgaagtttaggagcttgctgattcattcgatccgtcggatgcctgtccgttatcaggccaacaaactatggaaccgtcggatgttccggaccataaacacaagtccacaccaaacgtagaacactccgtcaatttctcctgggttcccttggttttggacaacggatgtcccgacacctttaatcttgtctttattaagtagtcaataatcgtcagaccatcgtaaacatcagcttaagggattaaacaatagtctatgagtactcgccggc

SEQ ID NO: 1756 - DNA, 418 bp, Bos taurus
  Clone ID: 60-LIB2809-004-Q1-E1-G8
gccatggccgccggatacaccctggcaccctccagggggctggggccaccttctgagtgaggcactttggaacctgcctttgcttcttgtgcttcccattgaaggctaggcaccccctgcttctgcaagcctcgcactgtccgctgggagcactgactcagggtaggcagcttatccagtaggccgggggcatccagcatgctctctggttctgacccagacagaggagactaaaaacaaatcctcttttgctccatggctggctctggcacaacatgagcattcggcttggccgtgcctcatgagtgcgaatgcctgtgcccaggatgtgtctatcaggctttgccagccttgtctggagtcatcagtgtggtaaggggcacaaggatatagatggagactctggaggccaagtgaa

SEQ ID NO: 1757 - DNA, 452 bp, Bos taurus
  Clone ID: 60-LIB2809-005-Q1-E1-G8
acccatgtatatatagctttatgtttgacccaactctggctcctaaaattctttcttttttgggaggcagctatgctcaccaccataccaccaatgtatctctttttgaagtctcaaaatgctgtagccatcttcttactatgaggggagctgaccaatatccccaagatggcagagtagaaagatgaaagaattttgacaatttcctgagctgctggaatcagcaattctggaaataaccaacctcaagatttcttgttatctagaataagaaatcttcctgttgtgaaagaaagaaaacaattcgtctgcagcagagaccacttttaccacaaactaaatgcttcttctttatcctaagcctaaagtatatcaggacattgagatttgcttttgagttttaggaccgccctgctccacagatatttcccagagtcaggagagaaagggag

SEQ ID NO: 1758 - DNA, 63 bp, Bos taurus
  Clone ID: 60-LIB2809-007-Q1-E1-G8
ttttgttctcgttcatggcttcgctcttgctcgccgcgaggatgttgggttattgggcgctct

SEQ ID NO: 1759 - DNA, 421 bp, Bos taurus
  Clone ID: 60-LIB2809-009-Q1-E1-G12
gggataccgcaagaccttgactgaggcttaggatgtgagatgccatgaactttgctgaacagtgtctctgttcagcaaactaaccagcattccccacaacacagtctagggcagacgatagtatagaggagtgttggaagaaccttgggtccctttgtccctgtaacctcagttgtctaggcagaaacctggctttattctatttaaaggttgaaaatatacaataccaaatgctctgccactgttgagctccaaggatggaaaggaggagaacatttcttcctgtattaattggatagatggaggctacagagcttaggctaaactaaaggcatccttgtcttttgagttgttcctctcagtaggaaaaaaaaaatctaatggaagatcactgtagattagatcctctgaccaagcacct

SEQ ID NO: 1760 - DNA, 389 bp, Bos taurus
  Clone ID: 60-LIB2809-012-Q1-E1-G12
acaccctggatccctccagggggctggggccaccttctgagtgaggcactttggaacctgcctttgcttcttgtgcttcccagtgaaggctaggcaccccctgcttctgcaagcctcgcactgtccgctgggagcactgactcagggtaggcagcttatccagtaagccggggcatccagcatgctctctggttctgacccagacagaggagactaaaaacaaatcctcttttgctccatggctggctctggcacaacatgagcattcggcttggccgtgcctcatgagtgcgaatgcctgtgcccaggatgtttctagcaggctttgccagccttgtctggagtcatcagtgtggtaaggagcacaaggatatagatggagactctgg

SEQ ID NO: 1761 - DNA, 410 bp, Bos taurus
  Clone ID: 60-LIB2809-013-Q1-E1-G8
actaggaggtcccctgaggctccccagtcacgtcgaagggactagcagtgtttcccatgagttcaggacagtgcttcccatgccaagtccatgggaagtaacaattttgggagtgacagttgaggctggtgctttgctagcacacttggggctgacagatgcttgctgtgtccagggctactcttccaagtctgaaacccccaagcctccacactgtgcctccagcctcctgcctccaggctggaatcttgtgcacattcatgcctgctagggacagacagaaatcctccacaaaaccagacatgtcagcatcagaaaaggctctgatggagacaggatgaacttcaaaatgggcttagcctggacctcaaactaattctagtgataaattagtggaaagagaaagaaga

SEQ ID NO: 1762 - DNA, 394 bp, Bos taurus
  Clone ID: 60-LIB2809-015-Q1-E1-G12
acctgttaaaggtggctgagctgtttgacaaacttaggagagtggagagtcgagtctcctcagatgaagacttaaagctgacggagctcctgcgatactacatgctcagcatagaggctgccaaggatctcttataccgagggcatcaaagccctcatcgactatgagagttcacataaagcgttagataaggcccggttaaagaccagacatgtctagctggccgaggcgcaccagcaggaatgctgccagaagtttgaacaactctctgaatctgcaatagatgagctgatcaatttcaaacggaagataatgccagctttcaggaagattctacttgaaatgtctgaactggaaataaagcatgccaggaacaatgtgtctcacctgcaaa

SEQ ID NO: 1763 - DNA, 184 bp, Bos taurus
  Clone ID: 60-LIB2809-023-Q1-E1-G12
cagcaccaccgcatgaatgggcatatctcgctgctgcactgacctgccatccacttctgctcagagctgagcgggatctctttctatcggatgtctgactccttactatcgcgcatctcgatctgcagtgccagggcggacgaggcgcggtcagttggctgtcccatcagaggtgtgtttttct

SEQ ID NO: 1764 - DNA, 398 bp, Bos taurus
  Clone ID: 60-LIB2809-023-Q1-E1-G8
ggtatattaaagtaattctcttagagtatttccctctgaaagagagggggcttgaagaagaggaagaattagccaggttgcctcctttcctctcgctgctggacaggagatggagaggttgaggggcagggtctgtaggcagttcctaagagatagggttacaacagaaaggctctgagatcacattgctgggggattcagaaggttactgagtaagttgttgggtgtcctgatatagaagctggttatacaaacaagttagatgttgggttcatttcattaattccactttctccttggattgagaaagcattagaaggcttctccccacggtggttaaccctttcactcaatccctttcctctaaaatttttttacaacacccccccccttttttt

SEQ ID NO: 1765 - DNA, 442 bp, Bos taurus
  Clone ID: 60-LIB2809-028-Q1-E1-G12
ccatgggcccgggatactttggagccataggtttccgctgtgagccctataataaccctgcagacttcttcctggacatcattaatggagattcttctgctgtggtgttaaatagagaagacataggtgatgaagctaacgagaccgaagagccttccaaaaaagatactccactcatagaaaaattagctgagttttatgtcaactcctccttcttcaaggaaacaaaagttgaattagataaattctcaggggatcagagaaggaagaagcttccatcctacaaggaggtcacttatgccacctccttctgtcatcagctcaaatggatttccaggcgttcattcaaaaatttactgggtaatccccaggcttctatagctcagctaattgtgacagtcttcctgggactggttataggtgccattttctatgatctaaa

SEQ ID NO: 1766 - DNA, 247 bp, Bos taurus
  unsure (147): Clone ID: 60-LIB2809-031-Q1-E1-G8
accgcaagaccttgactgaggcttaggatgtgagatgccatgaactttgctgaacagtgtctctgttcagcaaactaaccagcattccccacaacacagtctagggcagacgatagtatagaggagtgttggaagaaccttgggtcnctttgtccctgtaacctcagttgtctaggcagaaacctggctttattctatttaaaggttgaaaatatacaataccaaatgctctgccactgttgagctc

SEQ ID NO: 1767 - DNA, 135 bp, Bos taurus
  Clone ID: 60-LIB2809-026-Q1-E1-G8
gcccgttagtcaacgacagggtatgatgtgtgtgctaaagtcggctgacactgcctttccttccagcaaggttgtcactttgtcctaagcggctgggcgaaggccacatcctgacgcaaggaatgacgaacctga

SEQ ID NO: 1768 - DNA, 446 bp, Bos taurus
  Clone ID: 61-LIB2809-003-Q1-E1-H2
gctgtattcaactcttttccacaactcataccagaacaaagcagctatcactgcaggaaaagaaagctacagcatgtcaaacctgcaaggaaaacggttaatgtagaagagcaatgatttttcaacctcacagattttgtttttaaaaattaagctacctactactaaaaagtcaaaaaaaaaaataggagtgtaaataaacttccatatatcagtatacacgtgtttatgagacaggaattttaaaaagacaacacaaaaatgcttcaaggatcctagacagataggttaaataaaaactcactccacgtcaaagatataagaacaagtctgaaattcttgataagagagatcagaatggaagtgagaaactgaacggtaccaatgagcaggcattactggatgcaacattctttcctaacagacagagggaacaaaaagcacaa

SEQ ID NO: 1769 - DNA, 446 bp, Bos taurus
  Clone ID: 61-LIB2809-005-Q1-E1-H10
gataccggacgaccttgactgaggattaggatgtgagatgccatgaactttgctgaacagtgtctctgttcagcaaactaaccagcattccccacaacacagtctagggcagacgatagtatagaggagtgttggaagaaccttgggtccctttgtccctgtaacctcagttgtctaggcagaaacctggctttattctatttaaaggttgaaaatatacaataccaaatgctctgccactgttgagctccaaggatggaaaggaggagaacatttcttcctgtattaattggatagatggaggctacagagcttaggctaaactaaaggcatccttgtcttttgagttgttcctctcagtaggaaaaaaaaaaatctaatggaagatcactgtagattagatcctctgaccaagcacctaccgcttggaaatgcctgtggggtag

SEQ ID NO: 1770 - DNA, 438 bp, Bos taurus
  Clone ID: 61-LIB2809-005-Q1-E1-H2
gatacagcccggctccctccaggaggctggggccaccttctgagtgaggcactttggaacctgcctttgcttcttgtgcttcccagtgaaggctaggcaccccctgcttctgcaagcctcgcactgtccgctgggagcactgactcagggtaggcagcttatccagtaagccgggggcatccagcatgctctctggttctgacccagacagaggagactaaaaacaaatcctcttttgctccatggctggctctggcacaacatgagcattcggcttggccgtgcctcatgagtgcgaatgcctgtgcccaggatgtttctagcaggctttgccagccttgtctggagtcatcagtgtggtaaggagcacaaggatatagatggagactctggaggccaagtgaaagtggcagcttgctcaactttgtaaagagaaac

SEQ ID NO: 1771 - DNA, 356 bp, Bos taurus
  Clone ID: 61-LIB2809-006-Q1-E1-H2
ccctccagagggctggggccaccttctgagtgaggcactttggaacctgcctttgcttcttgtgcttcccagtgaaggctaggcaccccctgcttctgcaagcctcgcactgtccgctgggagcactgactcagggtaggcagcttatccagtaagccgggggcatccagcatgctctctggttctgacccagacagaggagactaaaaacaaatcctcttttgctccatggctggctctggcacaacatgagcattcggcttggccgtgcctcatgagtgcgaatgcctgtgcccaggatgtttctagcaggctttgccagccttgtctggagtcatcagtgtggtaaggagcac

SEQ ID NO: 1772 - DNA, 205 bp, Bos taurus
  Clone ID: 61-LIB2809-007-Q1-E1-H2
gctcatgagcagcgatgggccgtacagctggcataactacattgggatgtgcttcacttcttgcttgggtactttcggtccggcctatgattcgtgtacattaccctaaggggtaagcatggccaggatctgcaaacctcgaaatgtcagctaggagaattgacgcatgtttggccgcttgagtactttttccggggcaaccatg

SEQ ID NO: 1773 - DNA, 410 bp, Bos taurus
  Clone ID: 61-LIB2809-010-Q1-E1-H2
gggatactttggttggaatattaaagtaattctcttagagtatttccctctgaaagagagggggcttgaagaagaggaagaattagccaggttgcctcctttcctctcgctgctggacaggagatggagaggttgaggggcagggtctgtaggcagttcctaagagatagggttacaaaagaaaggctctgagatcacattgctgggggattcagaaggttactgagtaagttgttgggtgtcctgatatagaagctggttatacaaacaagttagatgttgggttcatttcattaattccactttctccttggattgagaaagcattagaaggcttctccccacggtgttgaaccctttcactcattccttctattaccttctagcggaaaatacaggactggctgggg

SEQ ID NO: 1774 - DNA, 340 bp, Bos taurus
  Clone ID: 61-LIB2809-018-Q1-E1-H2
gggatagggctaaacgtcctatagaacaagacaggggcccgtgtgtgagggccacacaacagggtaaaggtctcaggtgccagaaagcatccccggggaagggccatgcaagctgacaacaatgggtggaaggcgtgaacaggcgcgcgtccaggcggccccacagagttgtgggtgtctcaccagtaaccaggaaatgagacaaacgcggagtgcatgtctgcctatcagatttgcaggcgttaagaagcacattatccatggggaacgctggccatgaacggagcttcccataaactgcacgtggccgtgcctccagacaccaggcaacccctgtgtg

SEQ ID NO: 1775 - DNA, 323 bp, Bos taurus
  unsure (313): Clone ID: 61-LIB2809-019-Q1-E1-H2
ctggtgattccagagagagatgacataggattagagttgcttccctgtttcagtccatgccctcatttgcccactgaacacttgggtttgggacatgaccttcaggtcccttcagggctccaagggctctttgcagtctaggggcacagcctgaggctgacctgggccctctcgcatctgcctggtggtcgcaggaagttgcctccacccagaagcaaagatggtcctcggtcccagacagctggacaagggaagtgttgtgggtcagcactggccctcagcactcctgcatgggggcagggacggtgggcanaactttggaa

SEQ ID NO: 1776 - DNA, 367 bp, Bos taurus
  Clone ID: 61-LIB2809-020-Q1-E1-H2
ccatgggcgcgggatactttgattggaatattaaagtaattctcttagagtatttccctctgaaagagagggggcttgaagaagaggaagaattagccaggttgcctcctttcctctcgctgctggacaggagatggagaggttgaggggcagggtctgtaggcagttcctaagagatagggttacaaaagaaaggctctgagatcacattgctgggggattcagaaggttactgagtaagttgttgggtgtcctgatatagaagctggttatacaaacaagttagatgttgggttcatttcattaattcaactttctccttggatggagaaagcattagaaggcttctccccagggtgttgaaccc

SEQ ID NO: 1777 - DNA, 346 bp, Bos taurus
  Clone ID: 61-LIB2809-028-Q1-E1-H2
aaaataaataaacaaaacgaaaacgtcttcagaccgcttgtatccacacacaggtataaagtcaaccaaagcactcacgccagtctagatgggagcacgagagagacagaaaccctacgatgaaatcatgtccttgagctggttcttatttttcaaaagtcccagattatggagttcaggtaacccacaggccatacaccaggaactggaaggtttcctcgagggctacactgcccatgttaaacacagactgaaaacacagactcttgtgcaaaaggaaaagtctcttccaattccctccttaaaaaccaacagaaaaaacttcctgtggccaattggttggggc

SEQ ID NO: 1778 - DNA, 370 bp, Bos taurus
  Clone ID: 61-LIB2809-026-Q1-E1-H2
atatcccacacgtgggaagcgcttccatcgatacgttcactattgtatactctgaggtaaatacgttcccctaatgatcctgatacgtctttggtctctcaaattcttacggcgtgagaattggagagaagatagcacggccaacgataaactctaaacggtcccctcggcaatcactcacgtaagtgagattaactcgcttcgcgtgagtcgggcgtttggactgcccaaaggtctgctcggacgtcgattaatcaatgccggaagcgcgccccacaccgcctttcgctattcccgcgtgttggcgttggtgcgtgagtcagtgcgtcgcgtgcctgcttgccgtcgccccacgcctatgacgtgagtg

SEQ ID NO: 1779 - DNA, 488 bp, Bos taurus
  unsure (438): Clone ID: 62-LIB2809-003-Q1-E1-H6
ggaagccatggccgcgcgataccattttcttatttttttttttaaaagacagtgacgttggttttatggatcaaaaccagaattttcatgtttcacaattttggtgctagagatccccaaactgcctaactcactggggaaggtttctgaaggtgtgcattatagtaaacagcagcaaaatacccaacaacgttactgctaaaagcagctgctcctgcttgcgcctttagaatactagccgtaaaacagcaaaaacccgcacatctgtgtcagcagttgggatgtgagctactctaaacaacaaacaactgtgaacagtccaaggcaggacctctacaatcatactgggcaagcgctgagctgtggggagaaaatgtcagcacatgcccaagaggagacaatgcacacgtttagtattctaaaggctgcttcaggcangccagcaatgattctgctaagaccaactgctcacatacacacgcacgcac

SEQ ID NO: 1780 - DNA, 459 bp, Bos taurus
  Clone ID: 62-LIB2809-007-Q1-E1-H6
tggtcgcagcgaggtacaccctggctccctccagggggctggggccaccttctgagtgaggcactttggaacctgcctttgcttcttgtgcttcccagtgaaggctaggcaccccctgcttctgcaagcctcgcactgtccgctgggagcactgactcagggtaggcagcttatccagtaagccgggggcatccagcatgctctctggttctgacccagacagaggagactaaaaacaaatcctcttttgctccatggctggctctggcacaacatgagcattcggcttggccgtgcctcatgagtgcgaatgcctgtgcccaggatgtttctagcaggctttgccagccttgtctggagtcatcagtgtggtaaggagcacaaggatatacatggagactctggaggccaagtgaaagtggcagcttgcccaactttggtaaagagaaacagtggttc

SEQ ID NO: 1781 - DNA, 402 bp, Bos taurus
  Clone ID: 62-LIB2809-009-Q1-E1-H10
gggataccgcaagaccttgactgaggcttaggatgtgagatgccatgaactttgctgaacagtgtctctgttcagcaaactaaccagcattccccacaacacagtctagggcagacgatagtatagaggagtgttggaagaaccttgggtccctttgtccctgtaacctcagttgtctaggcagaaacctggctttattctatttaaaggttgaaaatatacaataccaaatgctctgccactgttgagctccaaggatggaaaggaggagaacatttcttcctgtattaattggatagatggaggctacagagcttaggctaaactaaaggcatccttgtcttttgagttgttcctctcagtaggaaaaaaaaaaaaatctaatggaagatcactgtagat

SEQ ID NO: 1782 - DNA, 367 bp, Bos taurus
  Clone ID: 62-LIB2809-014-Q1-E1-H10
acatttgcaagagtataaatatagagtatcaatggctctgtttgggaatctgtatctacacagggaaggtcatgggaaggctcagtttggtatcccaacctgctaaagtgattgaaaagctagaatggggaaggacagggtctgggagcactgccgcatcgatcccctttcccaggcttagttgaagctcacttactctccacggagaactacgtttgttgagggtaagaagcaatggcatgaagaggtgtaaataataatacaacgggggctctcaaacgcacagataaggcatctgggccaagaaggagcacacttcttggatccacagacatgcactcactctactgccacttgatgatcatgc

SEQ ID NO: 1783 - DNA, 471 bp, Bos taurus
  Clone ID: 62-LIB2809-017-Q1-E1-H6
gccatgggcgcgggatactttggttggaatattaaagtaattctcttagagtatttccctctgaaagagagggggcttgaagaagaggaagaattagccaggttgcctcctttcctctcgctgctggacaggagatggagaggttgaggggcagggtctgtaggcagttcctaagagatagggttacaaaagaaaggctctgagatcacattgctgggggattcagaaggttactgagtaagttgttgggtgtcctgatatagaagctggttatacaaacaagttagatgttgggttcatttcattaattccactttctccttggattgagaaagcattagaacgcttctccccacggtgttgaaacctttcactcattccttctattaccttctagcggaaaatacaggactggctgggggaatgggtatgaatctctcaactaccctatcaattcctggctctgccatc

SEQ ID NO: 1784 - DNA, 300 bp, Bos taurus
  Clone ID: 62-LIB2809-018-Q1-E1-H10
gaacacacgaagaactctgggaaatggtttgttcctcagactggaaatgccacaacctgagcttacactcaccgcggtccctggtatgttttctcgtcaccctcatgacttcagagacttcagacttgtggtcctttctctgttactagttctacacacctcacgctacgttctttcctctaacaaggaattcctgaatttcttaagaccttcccaatttgaaagaatttaacttcatactgcctaataatgggtccttttgtttgccttttaactccaatcaaaatccgtccttccctt

SEQ ID NO: 1785 - DNA, 401 bp, Bos taurus
  Clone ID: 62-LIB2809-022-Q1-E1-H6
gggatacccatgtatatatagctttacgtttgacccaactctggctcctaaaagtccttcttttttgggaggcagctatgctcaccaccagaccaccaatgtatctctttttgaagtctcaaaatgctgtagccatcttcttactatgaggggagctgaccaatatccccaagatggcagagtacaaagatgatagaattttgacaatttcctgagctgctggaatcagcaattctggaaataactaacctcaagatttcttgttatctagaataagaaatcttcctgttgtgaaagaaagaaaacaattcgtctgcagcagagaccacttttaccacagactaaatgcttcgtcattatcctaagcctaaagtatatcaggacatttagatttgcctttg

SEQ ID NO: 1786 - DNA, 407 bp, Bos taurus
  Clone ID: 62-LIB2809-028-Q1-E1-H10
ggataacacggagaactctgggaaatggtttgttcctcagactggaaatgccacaacctgagcttacactcaccgcggtccctggtatgttttctcgtcaccctcatgacttcagagacttcagacttgtggtcctttctctgttactagttctacacacctcacgctacttccttcctcttaagaggaatttcttgaatttcttaggactttctcattttgaaagagtgtagcttcatattgcttattattgggtccttttgtttgctttttaactcgactcacagtctgtcttcccctggagggcatgcatttcagtattatagaaatgcagtaaacggtaataaattatttacaagcacctagttcgtttaatcttacgtgaaagccattcgcttttggaaaac

SEQ ID NO: 1787 - DNA, 99 bp, Bos taurus
  Clone ID: 62-LIB2809-026-Q1-E1-H6
gtttcgggatagagactgtgtactgtacgggttgggtcccgggatgggtcccacggtgtgagaaacgatgggtggtgtcagtgaaaggggtctcctcct

SEQ ID NO: 1788 - DNA, 290 bp, Bos taurus
  Clone ID: 63-LIB2809-002-Q1-E1-H12
acccacaagtccaactacgcgtccgcccagacgtccgcattagcgtcccagcatggagaatacccaattcacaggcactctttccaatgaaaagatatagacagggagaatcgaacattccgacttgtgaacaggcagaaacactgtactttttgtaagaattgcaggtggaaacgattctctgtcactttaatgaccaagggggaagaacactagacagcaaactaccgttccactcacgactcttgaaaccaacaaagtaccagagagttctaaaaacaagcattttt

SEQ ID NO: 1789 - DNA, 393 bp, Bos taurus
  Clone ID: 63-LIB2809-006-Q1-E1-H4
gcccggagatataccctaggtccatcgagggggctggggccaccttctgagtgaggcagtttgggaccagcctttgcatcatgagcttcccaatcacagtctagggcagacgatactatagacgactgttggtagaaccttgggtccctttgtccctgtaacctcagttgtctaggcagaaacctggctttattctatttaaaggttgaaaatatacaataccaaatgctctgccactgttgagctccaaggatggaaaggaggagaacatttcttcctgtattaattggatagatggaggctacagagcttaggctaaactaaaggcatccttgtcttttgagttgttcctctcagtaggaaaaaaaaaaaaatctaatggaagatcactgt

SEQ ID NO: 1790 - DNA, 363 bp, Bos taurus
  Clone ID: 63-LIB2809-007-Q1-E1-H4
aaattgtcccggttaagcaaacaaacaagcattccccaaaacaaagtctagggcagacaatagtatataggagtgttggaagaaccttgggtccctttgtccctgtaacctcagttgtctaagcagaaacctggctttattctatttaaaggttgaaaatatacaataccaaatgctctgccactgttgagctccaaggatggaaaggaggagaacatttcttcctgtattaattggatagatggaggctacagagcttaggctaaactaaaggcatccttgtcttttgagttgttcctctcagtaggaaaaaaaaaaaatctaatggaagatcactgtagattagatcctctgaccaagcac

SEQ ID NO: 1791 - DNA, 357 bp, Bos taurus
  Clone ID: 63-LIB2809-008-Q1-E1-H12
gggggctgggggcaccttccgaattaagcacttttgaaactgcctttgcctcctgtgcctcccaattaaaggtaaggaacccctggttttgcaaacctcccaatgtccgccgggaacaatgaaccaaggtaagcagcttatccagttagccgggggcatccagcatgctctctggttctgacccagacagaggagactaaaaacaaatcctcttttgctccatggctggctctggcacaacatgagcattcggcttggccgtgcctcatgagtgcgaatgcctgtgcccaagatgtttctagcaggctttgccagccttgtctggagtcatcagtgtggtaaggagcacaaggatat

SEQ ID NO: 1792 - DNA, 339 bp, Bos taurus
  unsure (87): Clone ID: 63-LIB2809-009-Q1-E1-H4
tgagtccatccagggggctggggccaccttctgagtgaggcactttggaacctgcctttgcttcttgtgcttcccagtgaaggctangcaccccctgcttctgcaagcctcgcactgtccgctgggagcactgactcagggtaggcagcttatccagtaagccgggggcatccagcatgctctctggttctgacccagacagaggagactaaaaacaaatcctcttttgctccatggctggctctggcacaacatgagcattcggcttggccgtgcctcatgagtgcgaatgcctgtgcccaggatgtttccagcaggctttgccagccttgtctggag

SEQ ID NO: 1793 - DNA, 59 bp, Bos taurus
  Clone ID: 63-LIB2809-012-Q1-E1-H4
aaggcctgaatgggcatatctctctggggatagggcactgctttctggggaacaggcag

SEQ ID NO: 1794 - DNA, 69 bp, Bos taurus
  Clone ID: 63-LIB2809-015-Q1-E1-H4
tcgaatttgcgattacaggtggcttgctgttttggacccgttctgatcctgcaacccctccgccccgag

SEQ ID NO: 1795 - DNA, 355 bp, Bos taurus
  Clone ID: 63-LIB2809-019-Q1-E1-H4
ctttggatggaatattaaagtaattcttttagagtatttccctctgaaagagagggggcttgaagaagaggaagaattagccaggttgcctcctttcctctcgctgctggacaggagatggagaggttgaggggcagggtctgtaggcagttcctaagagatagggttacaaaagaaaggctctgagatcacattgctgggggattcagaaggttactgagtaagttgttgggtgtcctgatatagaagctggttatacaaacaagttagatgttgggttcatttcattaattccactttctccttggattgagaaagcattagaaggcttctccccacggtgttgaaccctttc

SEQ ID NO: 1796 - DNA, 120 bp, Bos taurus
  Clone ID: 63-LIB2809-024-Q1-E1-H4
tttggtgtcctgtcactttccggcgtcgtgcttcatttgcttttaccacatttcccgttcccatctggaatctgtctctccagctgcctttctgctgcgggggttgcgcggcgatactgc

SEQ ID NO: 1797 - DNA, 388 bp, Bos taurus
  Clone ID: 63-LIB2809-028-Q1-E1-H4
ggctccaaaaattctttcttttttggaaggcacctatgctcacaaccataccaccaatgtatctctttttgaagtctcaaaatgctgtagccatcttcttactatgaggggagctgaccaatatccccaagatggcagagtagaaagatgaaagaattttgacaatttcctgagctgctggaatcagcaattctggaaataaccaacctcaagatttcttgttatctagaataagaaatcttcctgttgtgaaagaaagaaaacaattcgtctgcagcagagaccacttttaccacaaactaaatgcttcttctttatcctaagcctaaagtatatcaggacattgagatttgcttttgagttttaagactgccctgctccacagata

SEQ ID NO: 1798 - DNA, 405 bp, Bos taurus
  Clone ID: 63-LIB2809-032-Q1-E1-H12
gatacacggtaagagtctaccggaaagcttattatggtttaaaaaaaaaaaaaagcccaagaagctagatagtgaaacatttatagtcataagatcccaaagcaagtagctagcacctgtcagaggtgcccatgtattcagcagcacagccctggcatggctggaagaagactcttctggtggaaggaactcgtgggaacacaatgaaggggaacgaactccagtcccaggcaagttccacaactagcaggggggtgtgtgtcaggatttcacggtgcagaaaagacagtttcctgtgcgactcctgaagaagcaaagatggctaattcaaccggaggtgacaacagccacaggaacacacgttagttagtcccttatccattacgacatttatcccccgacaat

SEQ ID NO: 1799 - DNA, 373 bp, Bos taurus
  Clone ID: 63-LIB2809-026-Q1-E1-H4
atactcccacacgcgggaagcgcttccatcgatacgttcactattgtatactctgaggtaaatacgttccgctactgatcccgatacctctctggtctctcaaattcttatcgcgtgagaattggagagaagatagcacggcccacgataaactctaaacggtcccctcggcaatcactcacgtaagtgagattaactcgcttcgcgtgagtcgggcctttggactgcccaaaggtctgctcggacgtcgactacccaatgcctgaagcgcgccccacaccgcctttcgctattcccgcgtgttggcgttggtgcgtcacccactgcgtcgcgtgcctgcttgacgtcacctcacgcctatgacgtgagtgaa

SEQ ID NO: 1800 - DNA, 421 bp, Bos taurus
  Clone ID: 64-LIB2809-004-Q1-E1-H8
atggccgccggatacatatggcaaagctacacgtattgtttgttgttacattgagtcctgggcagaagttttgtcccaaaaattcattatgctgcaaagccgcatagccgtatcgaggaatgcccaagtattgaagccatgacaaccaaggcacgacggttttgagatttaccaacagccctgaaaatatcatcataaacacaaaagagatggtcatgagcagagttgctatagataccacactctgacctgctgctatagccagcgccatggaactagctgaataagccaccatcatcagggtaagcatcatgatgaagaaggcctccacctttggcttcagtcctaacaagaagtatgttatacaagtaaatataatacttggtaacatcctcatggggagtaaatcagataacagttt

SEQ ID NO: 1801 - DNA, 387 bp, Bos taurus
  unsure (375): Clone ID: 64-LIB2809-006-Q1-E1-H8
accctaggtccctccagggggctggggccaccttctgagtgaggcactttggaacctgcctttgcttcttgtgcttcccagtgaaggctaggcaccccctgcttctgcaagcctcgcactgtccgctgggagcactgactcagggtaggcagcttatccagtaagccgggggcatccagcatgctctctggttctgacccagacagaggagactaaaaacaaatcctcttttgctccatggctggctctggcacaacatgagcattcggcttggccgtgcctcatgagtgcgaatgcctgtgcccaggatgtttctagcaggctttgccagccttgtctggagtcatcagtgtggtaaggagcacaaggatatanatggagactctg

SEQ ID NO: 1802 - DNA, 383 bp, Bos taurus
  Clone ID: 64-LIB2809-008-Q1-E1-H8
actctgggaaatggtttgttcctcagactggaaatgccacaacctgagcttacactcatcgcggtccctggtatgttttctcgtcaccctcatgacttcagagacttcagacttgtggtcctttctctgttactagttctacacacctcacgctacttccttcctcttaagacgaatttcttgaatctcctaggactttctcattttgaaagagttcagcttcatattgcttattattgggtccttttgtttgctttttaactcgactcacatctctgtcttcccctggagggcatgcatttcagtattatagaaatgcagtaaacggcaataaattatttacaagcacctagttcgtttaatcttacgtgaaagccattcgc

SEQ ID NO: 1803 - DNA, 391 bp, Bos taurus
  Clone ID: 64-LIB2809-009-Q1-E1-H12
gggcgcgggatacactttactttattatgatccagctcaggcttctctcttttacaaaagacctgcttcaaccaagagcagctgctcccatacagtccaacgcagcccaattcaggggaaatggtgtaattgtctgggatttggagaagatttggtgtggcctttttcccttctcggtgctcctcatatcccctggcagggttttcgtaagagagcagtcgtgtccctgagctggcaggtggaggatgagtgtgggaattggggaacatttgagggagatggttcatctctgccacaagagccttgggtgcttcttaacccagctaatttagaaaccaaatcggcatatgttctggctaaagcctagtgctgataaaaatcactcctgctg

SEQ ID NO: 1804 - DNA, 331 bp, Bos taurus
  Clone ID: 64-LIB2809-010-Q1-E1-H8
tgagtccatatggagagactcatagtttaattgcctattacagagccgtcaggaaattcctggctctgtaaaggtttaatgtcttgctcacagacagaatcggtgaattacgattttactgtgttgacagcttgaggcatggaaacagtagtggtttggaaactgatgcaaacgtctgtggattaaccctttgcatatctgaggctccataccctgcataacacggggaacaaattcatcaagaattaagaatgtgccgaattttaagtgtgttagcccagaaatatggccataggggttttgctgatcggcgaaaaacatcttcctggtt

SEQ ID NO: 1805 - DNA, 389 bp, Bos taurus
  unsure (324): Clone ID: 64-LIB2809-023-Q1-E1-H8
atattaaagtaattctcttagagtatttccctcggaaagagagggggcttgatgaagaggaagaattagccaggttgcctcctttcctctcgctgctggacaggagatggagaggttgaggggcagggtctgtaggcagttcctaagagatagggttacaagagaaaggctctgagatcacattgctgggggattcagaaggttactgagtaagttgttgggtgtcctgatatagaagctggttatacaaacaagttagatgttgggttcatttcattaattccactttctccttggattgagaaagcattagaatgcttctcnccacggtgttgaaccctttcaatcattcccttccagtttaaaaacccccgttttttccccccccc

SEQ ID NO: 1806 - DNA, 417 bp, Bos taurus
  Clone ID: 64-LIB2809-028-Q1-E1-H12
cagccagcgaagcccgtctctggccataaggtgtcacatggtgtagaacgtcgccctgcattggataaggcccagcttacgactgatgccgcaggtggcccacacgaaggcagcacatgcagcccagcatgcaccgcactggaagtgtgcagctacaggagcacatacacgggccaaggttccgaggtcgtcatcaacttctgtacagtaatcgcttcacatctgtatcttctgcacataatctgatatttactacatacgtgccaactttacacatcagtatttttactgacgatcagatttaacaagtgtgcatgtacctcagtccaaattcatttctttgatattaagatgcatcccataaagttgttgaagtgataaatttggcacacgatctcatagatgaacatatggcag

SEQ ID NO: 1807 - DNA, 332 bp, Bos taurus
  unsure (140): Clone ID: 64-LIB2809-026-Q1-E1-H8
cataatcctaaaattctccaaacagcttgaatgagtcacctaagcagtatagcgatgaccataaaaactgttcaaatagcccccgaaccgaaattggccctacccgtccgcaattttttggacaaaatttaccgcattgnttcgctgttgactgactttacttttgttactcaaaaggtggcttcagtgcatctgaagcctgttgattcaattttggtgagtcctccacacgtcgtgtgtcttgacactcacactaatcccaagacgatttgtgttaaggtcatgggatcccttgaaaagaattccaggttcatagacatagtccacatagt

SEQ ID NO: 1808 - DNA, 121 bp, Bos taurus
  Clone ID: 01-LIB3057-010-Q1-K1-A9
ctagatcgcgagcggtctaccactgtaatactagttctcacactgttccttatggatggtctattcttatatgcactctaccatgtacattagtctgagtttataatcccatactcattat

SEQ ID NO: 1809 - DNA, 439 bp, Bos taurus
  Clone ID: 01-LIB3057-012-Q1-K1-A1
tcgatatccttttgtaactctaccactttggggcaagctgttccagaattggttctggatgctgattgcaaatataccatgtacattgcactgttcttagagtgtttcagtacttaccatacatctacaagagtcgatcactattttgaccatcaccctattgtgcaaaacttgaaagacccagccagaagactatggagttcaggatccactaggcggttttcagtttgcttggagactgctgggtaatcaaaatgtcaaatctgattcaatgtgaactgtagatcttttttgaccaagagtctgcaaaactttctgttgatgctgtctattatttgtttgatatcattatttttcccccttgatcctgaaaagagttttatgtattgattggatggcagcaataaacttgccatttataaatctgttcaataaccct

SEQ ID NO: 1810 - DNA, 152 bp, Bos taurus
  Clone ID: 01-LIB3057-013-Q1-K1-A1
tctggccatccttctgaatttaagggggctcactggttaaaaaggccttatcaatggcctttggcccttctggaaaggttccaacacctggtcttaatcttcttcctggcttgacttcccccttggtcccttccaatcgaacttggtggggt

SEQ ID NO: 1811 - DNA, 221 bp, Bos taurus
  Clone ID: 01-LIB3057-015-Q1-K1-A9
atcgcgagcggccgccctttttttttttttttaagttttaaaaaaaattttttaaatggttttgccagccaactcaaagccaagaaatttcataatagtcattattcgaagagggggcggggaagcaaagggagggcacaaggcaggacgcaggagaccccagagcggcgaggtcagcttgggacggaagcacaggagactggggcggctggacaggggcc

SEQ ID NO: 1812 - DNA, 397 bp, Bos taurus
  Clone ID: 01-LIB3057-021-Q1-K1-A1
gcctgcaaagggctctccacacatctgtgccagttgtggcaggatacactctttgaacgcgacctgctttggaccttcagccaggcagagactgggggtaggctgaccagatctcccttgctctctccggtgggtggatgggaatgtagaagacccctcccttccccatgagcaccctctcagttcctgtcggcctccaacttgtataactccagaggtgtcacagttggatggttcaattcaaagaattcaaagttatttgtctactgcagaattgccttggacaacacctgttgctcactgaatctttgccacaaaaatggaacaggcacccccgtggggcagggtttgcccaaccccatcccaggctccccacccctaccccgtctgtctgtcc

SEQ ID NO: 1813 - DNA, 80 bp, Bos taurus
  Clone ID: 01-LIB3057-023-Q1-K1-A1
gccccattctaatccttgtctgagagagtcctcgctcttcacttattttcatctttccagaattgattgaaattattctt

SEQ ID NO: 1814 - DNA, 153 bp, Bos taurus
  Clone ID: 01-LIB3057-024-Q1-K1-A1
ccactcgtccgagattatcttcctgtttttccaaaaatattaagaaagtgaccagctcacaaatggactgttaagttttctaccatcaaaagtcctctgcattatcaactatcatctcaactaattgtccatctctcattcttaaatcatctc

SEQ ID NO: 1815 - DNA, 403 bp, Bos taurus
  Clone ID: 02-LIB3057-001-Q1-K1-A9
caggatctctgctgttagatgtgctgcagttggcagaggagccacctccccaggctggccaggagctgagagtgtggcctcgaggggcccgggagtcccgtactgtgaggccggcccacgtggagccgctgctgcgactctgggtccaacagggacaggtgaccacccctacctaccccccaaatctgcaccttcaacccagaccaagctctgatatctgtccttgagcctcttcccacctcccaacagctgtgtgagccgctgccatctctggctgaatccagagcctttgcccagcagtccctgcaccgtctgagccccgcccacaggcggctggagcagccggcactgtaccaggtcgcactgtctgagaagctccaggccctggtggacagactgagtg

SEQ ID NO: 1816 - DNA, 379 bp, Bos taurus
  Clone ID: 02-LIB3057-005-Q1-K1-A9
cttgctgggagagccttctggcacggcccttccgatcctactaaacagggcacgtgggtgggaagagtgaggacaggaggcagaagggggctggtgtgggaaggagtggaggctgatctcagcgcactcctagcagcctctgtggaagggtctcaagtgacccttgagatagtgagttgtcagtgtgaaagggaagtccttgggatcatttgtgccccccttcctttctatcctccacccccaccacatacacttcatccttctctagtggatgcacacgtgtgaaataggaggtgttcagagatgtaaagcggagacgtactgcttcgatacagaatttttcatttcattttatatgtcatatgaggaagcagaaaat

SEQ ID NO: 1817 - DNA, 404 bp, Bos taurus
  unsure (372): Clone ID: 02-LIB3057-007-Q1-K1-A5
acgcccagcgctctacgcctctctacagttcttttatctgggaagtggaggtgataacagtctctacacacacagctggtgggaggaataaagggaatatttaaatgaaaggagtttagaaatagtgtctggccctgttaatattgcaaattctgaaggtgttattctggctgggagatcagcctggagaaaacgaagtcgacttcctaccaatagttttgccagctgtcctgagtcttgcccgtttatatttatgagaggaagaaaaacgtgtgtggacatgtgttttacgttttctttttttaaaagtaacttacttttttttttgttacgatttttggaataggaaattcgtatgttacaacaccgcanagatttcaaaagatgtaccgtgcgttattttc

SEQ ID NO: 1818 - DNA, 114 bp, Bos taurus
  Clone ID: 02-LIB3057-012-Q1-K1-A5
cccactcgttctgcgagcggccgctctcttatctagaactctgttaagaggggccagaggggcctaataagacatttattgttcccagcatagctctgggccaaaaagaagtta

SEQ ID NO: 1819 - DNA, 435 bp, Bos taurus
  Clone ID: 02-LIB3057-013-Q1-K1-A9
gttctagatcgcgagcggccgccctttttttttttttttttttttttttgcgtgcagggaaagctttattaagtcatagaactattataattttttttaaacagggatgtagaatactcaaacattttaaatgacctatgaaacaactggcatatatttagtaagcaagatccactttaacaattctctctgctcccaccctcaatgctcaactataggacattcatttatttatcatgtttagtatttctgtctcacagccatctgtcagaccttttgctgcaaaaacgtgttttttaacaattaaatacacaatggggagatatggttagacatttacaggacttgaaatgttgaagaataatacacaataataggatcacaagaagggcagtggtatctttcaattcattttgctatttccagtctcttttt

SEQ ID NO: 1820 - DNA, 387 bp, Bos taurus
  Clone ID: 02-LIB3057-025-Q1-K1-A5
gcgccgggcaactggggcccggctgtgcgcagcgtccggcgcgctcagcgaagggacgcggcgagggccgggtcgcgggttccagccagtcgatccctaaacggtcccccggctccgatttccgacgaaagggttgaactgcgcagcgttcagagggggtccggaagttcggacatggtgactgaaggagggtgacgtggtcagatcaggggccgggggcaaggggaagaggccgagagcaccagcgtcgcgggcggagctgggaggcgcgcgcagcgcccgcggaggaggatccccgagcccaaagcagcggaaccactgattcaattggaatctacacacagtgcataaatgagttattagaagaactctgaaaggagtggggtg

SEQ ID NO: 1821 - DNA, 194 bp, Bos taurus
  Clone ID: 03-LIB3057-002-Q1-K1-A11
ggacccttttacccatttagagatgcaaacagctcagataggagaaatcagggaacgtgtagtgttgtctgcatcttgtttacatgtgggatgagtgatggcagatgaaatacaaccagaccactaaattttttttcaccgtttaaacatcaggtactcatattttagatttgagagttcaggctgttgttact

SEQ ID NO: 1822 - DNA, 441 bp, Bos taurus
  Clone ID: 03-LIB3057-002-Q1-K1-A3
aatttctagcttggtgattaatggacattttgctgtttcttagtgggtaatgtgtaggtccttttgaatcatgttgaaaaggctttaatgagcagattactaaaagaccaatagctctcagtgaatttcagtgtctgttctgtaagctcattctcaattcagccttgggcttcctgcctggagggatgcagacaacctaacttacgctttttacaggtaccagggacacgtagccataggtgacacatccccaaaagtgctctaagtgaggaagaagggaaaaatggtttattaaaatgtgaaagggactcagagatagatgtgtgatcagaaatggccatccatataggatttggatggtatcaccgacgatggacataagtttgaggaaactctggaagatagtgaaggacaagggagcccagccttctgcagttcatg

SEQ ID NO: 1823 - DNA, 314 bp, Bos taurus
  Clone ID: 03-LIB3057-007-Q1-K1-A3
gtataggtgtgtatatgtgcatatatacacacatgcacataaatccagatgctcattacaaaaccagatgctacacaaacagcagcagaggaaacaaggttggactcttgcaacagatcacaaaaaataaaaacagccacttgcagtgactttggtcatttctgtatgttcacaaggaatggattgtaacaaagaaaaaaaggaacagtgttagtgaaagaggaaaaatgggcgaaaccatcttgatccaatgggaatgcagtaatgttctatacatttcacctatttcttttcgtcatgttgatttgatttca

SEQ ID NO: 1824 - DNA, 397 bp, Bos taurus
  unsure (103): Clone ID: 03-LIB3057-009-Q1-K1-A3
gcaaagatttttatatttggtagaaacctatcagaatgggttgaatgtcaagttcctgaattaaaaaggggggcgtataacactgactgaatcgtaaagcctnctgcctagaggcttcacttacagctgtagtaactaatcttatttataaaaccactccgctaaacctctctctctccagctataaacacagagatgtcttagctttgggaacaggccaaaagcaccctgatcccattagatgctgaggatccatgacccctttgggccgctttcccactgctccatctccaggtatttttcagtggcccctgagtgccgcatccccacagcagcaagcacaaggcctctccaccacttgggttctggctgagggggagatacaggagcgcactga

SEQ ID NO: 1825 - DNA, 340 bp, Bos taurus
  Clone ID: 03-LIB3057-010-Q1-K1-A11
atccgatcgctagcggtcgcactgccactatattaccttctttaaaactggataaccaaacgctgctactggggaaacggagctttccaacttcaatccactgaccatcgggtgtctccaaacttaacaatgatggatttcattattacaaaaatcttattgtagcccttttaagaaccacttacgggaaaccccttgaaaagaatacccaccaccatccttcttgtgtgaatctggtacttgatatgaatcttgggttctgctctcttttgggatccaaaccttggatggcccacttttatcctgcttaaggctgtccaatttcttgtttaacctaatt

SEQ ID NO: 1826 - DNA, 64 bp, Bos taurus
  Clone ID: 03-LIB3057-012-Q1-K1-A3
ccacgcgtccagaaacctggttgctgggaacagctcaacgggtcaccatgcccttaatactcac

SEQ ID NO: 1827 - DNA, 108 bp, Bos taurus
  Clone ID: 03-LIB3057-014-Q1-K1-A3
gtttgaagtgcccctccccccacttttaagtttgaagtcacaacttcttcccaggacagtttatgttttcgtgttaccaataacaatacaattacaaccaataaatca

SEQ ID NO: 1828 - DNA, 313 bp, Bos taurus
  Clone ID: 03-LIB3057-015-Q1-K1-A11
ttataaaatatctgctatctaacaagatgtctataaaaagtttggtagagagactcctttagccatagtttaatagtttataaaatatctgctatctacagatgtctataaaaataggtaattcaggcttggagtgagttctgggattgacaatattttaagctcttaaaatcacaattgatgagccacttgatttcagttttcctaaggacaactgttggtttgaacctggaaccggtcttaaggaccggtaaatttgtattaaactcttacttaaacaaagccagtttacagaggatagtgcacaggagcc

SEQ ID NO: 1829 - DNA, 422 bp, Bos taurus
  Clone ID: 03-LIB3057-016-Q1-K1-A3
gtttctgtgctgtaatccacagttctgtgaccttgtccaataaaaaggccgttttgcagctgcagcaagtttgccatacaagatgaaacaagatgccacaagaaatgctgcctacactgtggattgtgaagattatgtggacgtggtagaattcaatccgtttgagagtggggattcaggaaacctaattgcatatggtggcaataattttgtgttcgttggcacctgtacatttcaggttagtgtacaaaactgcactgagtgacagtgaagatgttacactgaaaagaaaacttctacaaaacttggtaattttcactaaactttgaaagcatgctgagcttaaatgtaaaaaaaaaatggatgaagaactactgagaaagacatcctagtaatatatgcctaatatttgtgcaaacact

SEQ ID NO: 1830 - DNA, 270 bp, Bos taurus
  Clone ID: 03-LIB3057-017-Q1-K1-A11
ccactcgtctcggagcggccgacctttttttccgccccgcctaagacatgcttggcttcgtctgaatctcaggttggctagctatttcaatatgtcagacttacatctactggctattaaaattaaaatcaaatggtgtctgtaaagtaaaatcctcatgaatgtactgaatcccacacttttcacacaacctttaggtatccatatctgttctaaaagtaaacacatctattcaaactctcgtactcttcttgcaacctgttaatacat

SEQ ID NO: 1831 - DNA, 293 bp, Bos taurus
  Clone ID: 03-LIB3057-018-Q1-K1-A3
tctagatcgcgagcggccgccctttttttttttttttttttttttttttttttctcagcagtgcagtttccttattttattgggatctcagcaaatgtgctcatgtggcacctaaccggcattaaaccaaagccctcagagtgacaagcgtgggctgagacaactgcaaactttccatgtgtaggactcaatgcctattcacatcacaacacctgttcctctttctggtcccttagagtggcctaaatgtctcaagtgcgctaacactgccggtcacaaggtggtggaaaagc

SEQ ID NO: 1832 - DNA, 262 bp, Bos taurus
  Clone ID: 03-LIB3057-020-Q1-K1-A3
tccgacccacgcgtccgcggactgactgtccattgtcatgatttggttcctggtgcatttctcctggggacggcgatcacttgggcaagttgataaatgagcacggcgtgcgtttggggtgtgccgaaatgatcaactttctgacttgtacattaccgaaagtagggtgacagtgtgctggagacaccctagaatgccaactgggctaccctcatcctatgccctagtgaaaactggcagctctttgccttaatggctccac

SEQ ID NO: 1833 - DNA, 145 bp, Bos taurus
  Clone ID: 03-LIB3057-023-Q1-K1-A3
ctggattaaaaaaaaaaaaatcctgctctttaaatacattaattggcatgtatgcttcagtgatttgcagattcatgtgggctgcgtttaactccttacaggagtagagggcatggttcgtagttgagagtggtgattttcttca

SEQ ID NO: 1834 - DNA, 266 bp, Bos taurus
  Clone ID: 04-LIB3057-001-Q1-K1-A11
atcgaaatgagggagctgctcttatttgtccgaaacacggacccagaagcaggtcgaattcaaatggtataacacaagtcaccatagtaactttcagagcttgaaggtcgaagagactgatcgtctatgtgagcatccccagctagagacactaacgactctcagtacaggaccgtgctcgttatgagacaattttgctctcttgataacataatataaatatccaaagaaaggacaggctctgggaaaagatagttaccggatat

SEQ ID NO: 1835 - DNA, 81 bp, Bos taurus
  Clone ID: 04-LIB3057-001-Q1-K1-A7
tcgggagaaagcaaggtcccggacccttgcttttccgggccaaaccttggttcaagggaccatggttgccaaggatgtggc

SEQ ID NO: 1836 - DNA, 344 bp, Bos taurus
  Clone ID: 04-LIB3057-002-Q1-K1-A7
cggacgcgtgggtgcagatttcacttttttgggcaacttcttaagtgctctccgcttccaggatgaggaaggatctgcagatgctggaagctcttctttttcataacatttaggggaattatttgcaagattccctaggtttattctaagaaattctactctctataaaagaagcctgagactttcgggttccttcctttctctgccctgacctggagggtcctagggagagcaatgcctctccaaggggcctcagatgcctgagccgatggggagggaccaggaaccacctttgtcccaggggcccatcttcatatgctctttctttcccagcctcttaagaa

SEQ ID NO: 1837 - DNA, 456 bp, Bos taurus
  Clone ID: 04-LIB3057-005-Q1-K1-A7
gaagagtacggccctgggagcgctggaggcggctgtggcggccgcgactggaataactttacaaaagggaagataatttccgtctgccctttccgccagaaatggccaatgtgctctgtaacagagccagactgatttcctatctcccaggattttgctctttagttaaaagggttgtcaatcccagagccttttcaactgcaggatcttcaggttctgatgagtctcatgtggccactgcacctccagatatctggttttttcccaataataactaactacagtactacacagttctcggttccttgactctgaggatgtggagatgactaagcagagaactgactatgaattatactcagatttgtgactgcagggtttgaacaactaactcttgagttgctcaaaggctctcgaacagtttggcctgatgaaactatgggaccatttggacct

SEQ ID NO: 1838 - DNA, 409 bp, Bos taurus
  Clone ID: 04-LIB3057-007-Q1-K1-A11
attatatcataaacttgggttttggatttgctttccagtaaaattgattgaagtcatggtttaaatgatgctctatatgttataatgcaacaatgttctctcattgttgtttactttttatctttagcattgccttcaatgccttgtgatgatgctctgcccattcccacaacctaaaaagaaattacagtgttaatttctgtctgttagcgtgtgaaatgtatttaaatgtcatttcctcattgtctggttatcacaatgctttgctctgctagttcatgatcaagtattggtagtacttttaaaattatttaggtatagtttgtaatttcatttggcatcaatgtgtacataatcttttgtcatgttgcagtgtgtatgctgttgggaggatcgtgataaaatgttc

SEQ ID NO: 1839 - DNA, 416 bp, Bos taurus
  unsure (357): Clone ID: 04-LIB3057-011-Q1-K1-A11
gctggcgagtgccgtgaaggagcagtatccaggcatcgagatcgagtcgcgcctggggggcacaggggcctttgagattgaaatcaatggacagctggtgttctccaagctggagaatgggggctttccttatgagaaagatctcattgaggccattcgaagagccagtaacggagaacccctcgaaaagatcaccaacagccgccctccttgtgtcatcctgtgactggatgtgattctcggttcctgctctcttctgggatccaagccttggttgccccgctttgatcctgctgagggctgcccactgcctgtctcacctcacttagctcctggcagctaagagaccctggcctncactttgcccctttggtgggcaccaggagggagtagatggttctgtggtcttaggggtg

SEQ ID NO: 1840 - DNA, 347 bp, Bos taurus
  Clone ID: 04-LIB3057-011-Q1-K1-A7
cggacgcgtgggcccgaaggtacatggagcctttcagtgaatgaatggcgagcagaaatgaaagttaaaaaaaaaaaaaagagaaaaaaatgaaggggaggatgagtgagcagtggacatacctggatccagaagggagcatggcagaaagggttttgagtcatccagtcctgcgaactgaggtctgttccatgaaaggattaaaaaggagaataaaatatctaaataaaaatctagaaatgtggaagaaaaagtaacgggtgtgaagtccagaaaaatattagtgggtgaatggataacatacaaaagcaggcaatgctagcagttgagcaacagacggtcatgac

SEQ ID NO: 1841 - DNA, 387 bp, Bos taurus
  Clone ID: 04-LIB3057-020-Q1-K1-A11
tttatgtactgggattctatgaaaaaatctttgaaaaaaaagagttcctttgagccggcagagcaggctcgttcagaaattgctggtccaagagaatgtttaaggcttaacataagctgagcaactgagaattgtagtggagcataacggagtagagggagggagaaacaatactcagggcagagaacagattcgttttctctccacacaccacagtgaaaatgggaagaaggtagtgtgattatttggcagccaaccatatgctacttgctgggattatgctggactcttttttagttgagataaaatttgcagaaaataaagtgaactattttaaagtaaatgtataattcagtagcatttagtacattcataatgtggtgcaac

SEQ ID NO: 1842 - DNA, 182 bp, Bos taurus
  Clone ID: 04-LIB3057-025-Q1-K1-A7
ctagtcaccgagtgcggggtatgaaaggagccccagatgctatcctatcgagggccatgtacatttctacagaatctgtttttatttaacaattaacccatattagacccacatgtacattacaaatctataaatctcataaaattttcacaggatatgtattatataaacctatctcaaaa

SEQ ID NO: 1843 - DNA, 63 bp, Bos taurus
  Clone ID: 05-LIB3057-001-Q1-K1-B1
tcgggaaaaagcaagttccggatcccttgctattccgggccaaactttggttcaacgatcatg

SEQ ID NO: 1844 - DNA, 405 bp, Bos taurus
  Clone ID: 05-LIB3057-006-Q1-K1-B1
cggacgcgtgggcccacgcgtccgcagatagtcagcttctgagtgccagcctaggattgtccatagactcaacaatgccccggacatctgcttttccaccaaataactattttgtgacaaaggccacagaaggtacacagactgtgctagaatcaatcagaaaaaaatacctaccccgttgatttctttattctgacatcttgaaaccgagtgatcctagagcaacctcaaactccactgacttaatcataatacttcaaagatctcctttctatatcccttagtgtactgatttctgcaaatattccctgcatcctgccaggaacttctgagatatgctataatggtcatctgttgctcccctagcaacttagaaatgatagatattttaaaatagctctattg

SEQ ID NO: 1845 - DNA, 335 bp, Bos taurus
  Clone ID: 05-LIB3057-014-Q1-K1-B1
ctcgtttattaacctctggagacaccagggttggatggaaggttagtggaatagaggagaagaagaacactgtgtgaagttacatgcagcgaactccttcgggacaaaaagccctcagaaggaacaaattgaactcatcttttcccaaaatttgattcagtgtcttcattctccccaaatccttgacccaaagcaatagaccaaaagaaacaacgaaacagtcagaagcagtcatcatttttggaacaacttttcttctccttttgttcaatctacagctcataagaaaccaccagatgataattagggtttaaaataaaataagtcattctctt

SEQ ID NO: 1846 - DNA, 415 bp, Bos taurus
  Clone ID: 05-LIB3057-014-Q1-K1-B9
cacgcgtccggcctggttgagagattccaggaccacattgggcccaaagggacggcaggaagctaggggacagtgggtgaggaaaacctacccctaggagtgggcaaagggcatgaggaagcccctgcaggaggaagagcacagcacaggtcaggcgagtgaggaagtgggagaggtgggaagaggccagcacaggacgggctgctcgaggcagtgtcccagtggagaagggtgagcagatgagcccccgggtctgagggagcatcagattccagactgtcagacttggaggaaaaggacccaggaccaggcagacagcgagcaaatggatgtaggggagaaggcacctgaatgatggtgttgtgctgcaattgctgttaatggttcaagagtgaattgccaacttggtggtccc

SEQ ID NO: 1847 - DNA, 355 bp, Bos taurus
  Clone ID: 05-LIB3057-017-Q1-K1-B9
gttagccaccacaacggcactggttaagagcacagaacttggaatcacgtgcacacaggtggcagttccgtttacaagctttgtgactttggacagatctcttctcggttctactaactgtcaaatgggggcgaatgctgcttagaccacagacttgttataaggattaaatgggacaatttctgcgaagttcctgtatggtatctaattcatagtaagcgctcaaaaatggtggagagtaggttttaagatggccatctttcctacttaaccttaggctaattgagagtaaggagcttgccatacctaattattcccagctccaactcatggcatgacttttagtagtgctttt

SEQ ID NO: 1848 - DNA, 334 bp, Bos taurus
  Clone ID: 05-LIB3057-021-Q1-K1-B9
gtccgcggatcgtcgggctaaactgcctttacttattcacccacctataaaggtagggaatcaggggtggttcagaaatgtcgagcttctgaggccaaggttccgcaataatgcagtgctttggatggcataagaactgagtcagtctgtgattcttggacagcctggtcctttgtagagggagaggatcccggaactgtgttcaggggatttgtgcgagggaggaggtcttccaggaaacacgacctcccctaagccgcttactctcacctgcagccccttcccactctctccagctcctgtgcaagcccctactgcctggcctcttcttaat

SEQ ID NO: 1849 - DNA, 156 bp, Bos taurus
  Clone ID: 05-LIB3057-022-Q1-K1-B1
acacattcgacaactacacctgccagccaattggacattccaacatcatcagccgaatccctaaatctcatgcaatagacaagcaactactttactcctgtcatgaccgacttgtaggcacaatgtttagtgctacggactataatcatagcatgg

SEQ ID NO: 1850 - DNA, 420 bp, Bos taurus
  unsure (396): Clone ID: 06-LIB3057-007-Q1-K1-B9
ctcggcccagaccggaaaatccggtctgaactggctcgaccgcctccggtccaacgagggcatccccaccggcgacgaacccaacctcgattccttcctcctcacggcccatccgcaatcccctcaggcccgccccaatgacccgccccggaaccctccttccgaggcccgcgacgagcccatgcccatgagcaccatcctcgctgagctcttctgcatgggcgccaccctctccaaaaccaacaaaaaatgcccccggaaacagacaaaccctaaaatcttcctcgcttcctccgccaccaccaccaccacaaactccaaaccctccgtccccgccgccttgcctgccgctcccagcggcgacccggcggtgccggaagtggaagaggaggccgncgcggaccgtggtgaggacgagga

SEQ ID NO: 1851 - DNA, 382 bp, Bos taurus
  Clone ID: 06-LIB3057-008-Q1-K1-B5
accggatcggaatttccggatgcgtacgccacgcgtacgcgtcaggaattcgactcgagagccaatcccctaataccaactcttaaccagacatctgtcagggattgtattggctaatgatgggtgcagagatatacacatcatagatgaaaatacacaaggataatgatgcttatccaactgagtttgaagagtgtgctatacaggcattgcctgatctatagattaccatccaggagcttaaaaatgatctgaaagatttatacataaactcatctgttcatgtttatgcttttaggaaccataaggctatggctatcgatgtattttacatattaaggagagatacccgttgaatacatgtaaggctagtcagagaact

SEQ ID NO: 1852 - DNA, 296 bp, Bos taurus
  Clone ID: 06-LIB3057-009-Q1-K1-B9
tagatcgcgagcggccgcccttttttttttttttttttttttttttttttttttgggggttttttatttcttttctggttttttcttttttcgcgggaaagaaaaaataacttggaaaaaaggcccggaaagcaccaccactacaccaagggaaactggaaacaaaacccctacgggcccacagcaaacttctgagcccgcaaaagaagaacaaggttaaaggggcgaagcaccggaggagcaaccacccaggtgaagagaacacgctccgaaaaagaattccccgccagaacacg

SEQ ID NO: 1853 - DNA, 190 bp, Bos taurus
  Clone ID: 06-LIB3057-012-Q1-K1-B5
gtcgccacctgcctgtgggctgcgtttccttccagaatatctcatccgacgttctggaggagtccgccatcttcgacgtcattctttcacccgacgaggaaggcttctgttcccggaagcacttcacagagatggggctggtggggctgctggagcaagctgccgtttacttgaacatgggcgggctcta

SEQ ID NO: 1854 - DNA, 277 bp, Bos taurus
  Clone ID: 06-LIB3057-018-Q1-K1-B5
gtcaaggacaagaaaagattcagtatctgacaaagtggtgtatgttcttgtgggagaatggtcaagttgaagcgagtagcagctattattgcctttacacagggaagactgtctttggtctgtaacagccccatttctccccattcctattttaaaatgctgcctggcatctctaggcacttgactttaggaatgctgtcctaaatgcccgggtgaatatgggatcctttaaaaatgtccaatatctactaacattccgaacttgatgcttcccctg

SEQ ID NO: 1855 - DNA, 362 bp, Bos taurus
  Clone ID: 06-LIB3057-020-Q1-K1-B5
gacccaggcgtacggactcgtgcggaaaactatacattacaaacatgacctaatgcagaggctcagattacctgcacttggaagcacatggatttggagccacaataggatctaggcctgctgatctagagacagatgccaaagattgacatgtcaactcatatagcgcatctgaaaggagtcagatgatgacccacaggagagactgactagccgctccgagtggaagctcagaaacctggggttagaccaattgtgaaagagcttcgcgaatgtaccccggactgtgtcctaccaaagcggattaacagcttactcattggttcatgcagagagtgagagaatgccacatttaggagctg

SEQ ID NO: 1856 - DNA, 407 bp, Bos taurus
  Clone ID: 06-LIB3057-021-Q1-K1-B5
gcgagcggccgcccttttttttttttttttttttttttttttttccaactattactttatgtatattactatgcttaagttacatggaaaagacaaccaagcagttctgccccatatcaggaaaagtttccaatcaacaccaattatgtggtgacaaataactaggaatggtgacatctttgggtcaagactgacaaggaagaatgggctctgatgctacggttcatctccaacaagaatatggcacaatggccagcacaagcaatactaacactgaacctttagcgctggtcacaaattcggatctcttctctgaagctagcaaatcaagtgaaataactgggtttttttaaaaagtcttaaaatggaacccaaataaatttaaaaatcatgctcttgacacactt

SEQ ID NO: 1857 - DNA, 178 bp, Bos taurus
  Clone ID: 06-LIB3057-023-Q1-K1-B5
tgtcgccacctgcctgtgggctgcgttttcttccataatatctcatccaacgtgctggagtagtcctccatctccgacgtcatgctctcacccgacgaggatggcttctgttccgggtagcacttcacagagatggtgctggtgggtctgctggagcagtcagtcatctacttcacca

SEQ ID NO: 1858 - DNA, 357 bp, Bos taurus
  Clone ID: 07-LIB3057-003-Q1-K1-B3
cttccttaagcaaaataacaaaatagttttttctcctgaattaagatatgtaaagtccttagaatagtatatggtagatattaagtgtttgcaattattattctgggaatatgtcccatgttacctcagatctaaaaatactattggattaagggatatgtgaaattattaggtatgtaatattaaccatgaaaacataatagatataatttacagaaagctagtgtttgatatttctgtgacattactttattaccaaaacctgtgacctttttctaataaactagatgttaatttaatattaatgcttggctttgaacatgttaaattttatgaacttggttcttaagaatatca

SEQ ID NO: 1859 - DNA, 334 bp, Bos taurus
  unsure (150),(299): unsure at all n locations; Clone ID: 07-LIB3057-004-Q1-K1-B11
ttttaatgcttttgtggaggctcattaaacctttgagctctacatttcatttgcctttactctaaaatcaaattagcatgattgaagactgaatttttccaaagtgagagaaaatcacagtgaaacaaaatggtaaattgtagtgggtantgtgccttatttgagattattaacagattcctttttattgtaatcacttgggatttgtgtgaacagatggctcgcttagcttattggataaattgccccaaatgagctatccagttggtatttactctgtctacttagaaagatactgngtgttaagtcacacttttgccttcatgattgcagt

SEQ ID NO: 1860 - DNA, 251 bp, Bos taurus
  Clone ID: 07-LIB3057-004-Q1-K1-B3
tccgatccggtgacagctccgggaaattgaatgatcgcacattcaaggtttatagacctacatggaaccaggctgatctgtagccggccatgactattcagagacagtgactgttgggattacactattcaactggaatcagatgtttaagaacaaaaaaccagagcgtcttagttgtgcaaagacagcgcactgtacggcagttgccaacccttgacttatgctaggtgtaggcttgttggaaaactcag

SEQ ID NO: 1861 - DNA, 379 bp, Bos taurus
  unsure (222),(286): unsure at all n locations; Clone ID: 07-LIB3057-007-Q1-K1-B3
gcggacccgtggccggggatggagagtccgtgggatctctttacggcctctggactggaggccgagcccccgcccgcggccgagccccgcgcccggcgtctccgcccggggtgctctccgcagtttcctggcttggaagcctcgggaacatggcgaggcagcggtggtttaacgggaaggacggtgactgttagcctgtgaacgaaagcgagagtgagccgnctcacgctccggaccaagagtgatcttgaacttgtggctgctactagatttttgcccacacctnctcgtatgctgcggcttctccactggagtggggccagggtgaccgtggacttgccgcaagtcagacggctgcaggtcacagcaagtccagtct

SEQ ID NO: 1862 - DNA, 424 bp, Bos taurus
  Clone ID: 07-LIB3057-008-Q1-K1-B3
tagtacctagatcgcgatcggacacccttttttttttcttttttttttttttttttggtagaaggatgttttattccatgggtgaacacactaccatgccacacttcactccctcctgccagatctcatggccagggccggcctcccctttcagactgagctggctgtgcagtcggtcaggccctgacaagacaaaaagcatggccagctggcactcggagtggtcctgcgggcggcaccttcatccttttcccaaacgctgatgtatcacctgaaacaatcccatgacgatcttccagccggaccaactgcaactgacattcaaagctcgtggagatgaaacgcaaaccttcgaacaccaaatagtgactcggacctgtcttctctgcaaaccaggatttcagggaccttctgctccccggcg

SEQ ID NO: 1863 - DNA, 281 bp, Bos taurus
  Clone ID: 07-LIB3057-012-Q1-K1-B3
aaaaaaaaaaatgatagtatagcataaaaaactttaaagtcattattgtaaggataaaattctttgtgtggaaattgtccccccaaaatgggtatttaaacaaactgttacctttttttttattacagtgtgcttgcaaaagagtataatcttaaaggggagaaaagaagttgaagagatctgaatttacagtgaagagctatccatcagtaccttatacacttaatttataaaaagctccaaggtgacatattattataataggcattactttgaaaatc

SEQ ID NO: 1864 - DNA, 225 bp, Bos taurus
  Clone ID: 07-LIB3057-014-Q1-K1-B3
gtttttactactaaacttttctccaaattacccatccgtgacttggccagacctggctgtgcagctatggtgaggtgaggagcagttgtggacacagcaggctgctgggcaaggtaagggggagtgaagggaggagtgactggggggcacgcatgctctcatcccaccttgagagcactagagcaaagcccgaatgctgtctaggctgtgtaatgctggaaagac

SEQ ID NO: 1865 - DNA, 316 bp, Bos taurus
  Clone ID: 07-LIB3057-017-Q1-K1-B11
agggacttgacttgatgcatctggccatggttgcagatctcaagttatggttagttctctgctggtcctaactaaacccatgttggctggagcagtatctgcaagtatgtttcaagtctactagatgtgatcgagcaccgcatgataaagagcatgctgtgggagaccagcctgccctcgggctcagattccttgcaagtttgaaaccatacgccccagttccttctaggtaggaagaaccaaatacacagatatggagtcaagagggagggttgaatatacaatgctgcttcctccccacttgttggaaggactg

SEQ ID NO: 1866 - DNA, 187 bp, Bos taurus
  Clone ID: 07-LIB3057-023-Q1-K1-B3
cggactcgttggctctccgcagtttcctggcttggaagcctcttgaacatggcgaggcgtcgtttgtttaacttgaaggactgtgtctgttagcctgtgaacgaaagctagagtgatccttctgactctccggaccaatagtgatctttaacttgtggctgctactatatttttgcccacatccttc

SEQ ID NO: 1867 - DNA, 408 bp, Bos taurus
  Clone ID: 07-LIB3057-024-Q1-K1-B3
gcaaaatcgtatttttaattcctcaagcttttttcataaattcattgactcaaagagtcatgaagcaactcctgtctatattctggacattctggatattctgctgtctttgccctactttgaatataagtttagtttcacaatgaagatttttttcttttagcctatttgtaatgtttgagttaatttgtaatgttgatagtttctactttctacaaagccagcacctgttcttatagttgtctaaattttcttaggggttaataatttgtttccctttgagccccagctgcaagcacccaggggtctgactgactttctgaaaggagtaggtatttgaagttctcttgaaagggaatgggacttgatcaatagttctaagaatggataagaatttgccagggaaaa

SEQ ID NO: 1868 - DNA, 329 bp, Bos taurus
  Clone ID: 08-LIB3057-003-Q1-K1-B7
gccagggcagtccggagacctcatgtctcagccatctttgtagctcccacggtccggcagcctatgccagacctgttggaaactgggaggtggagagcttctagggttaggagccaggacatccagtcaccctgtggccctaccagtaatttgctgtgtggcctctgtcaagtcactgatcctatctgaatcccagccgtagaatgagaagactactccgtgggcattccctaaacagtggtactaggtctaagataataagactctgctggtagatgctgcacacgcacagttaaatatgtttctcagcttcaggacaaacatgtaaa

SEQ ID NO: 1869 - DNA, 383 bp, Bos taurus
  Clone ID: 08-LIB3057-007-Q1-K1-B7
gttaagagattatcttcctgtttttccaaaagtagtaagaaagtgatcagtgtttaaatagaatcagaagactgctgccatcaaaagtgccgggattatgagtatcatctgactaatgtccatcctattttgaatctctctgctggtagaaaggcaagttttctcaggagggaggggtgttctaacacccactttacacgagggtgcttttgcactgtggataagagcctgggcacagtgttggaccccttgggttcaagtccaagttcatctctgatgcggacagtacttccctcatgggactgaaaacagagactgacccatgttacgtactcgtgtgaaaatgtggccctgcaagacgtcagcaggagcagagcccagaa

SEQ ID NO: 1870 - DNA, 387 bp, Bos taurus
  Clone ID: 08-LIB3057-010-Q1-K1-B7
cgaggacgcgtcacgcggtccaccagtcataccaagacgagctgtacagaatacttcaatctgcaagacgcacgatgcccggtgatccatggatgtggttacgacgccagcactgatctccagtcagaagaagcgacagcatataggcccctgcagggcacaggtctgacattggtacatggatctgcctacaatgccagcttagaggcccagacataaaaggagctgacaggctgaccaccgttgcaagacgcatgacttgccttggtacagggatctgcatctagagatagccattatcccgagtcagaagaagatgacctgacagccttcccacaagcgaaagatgcacgtctctccttggtccagggatctgcctccgaggcc

SEQ ID NO: 1871 - DNA, 255 bp, Bos taurus
  Clone ID: 08-LIB3057-012-Q1-K1-B11
caccccaaacatatttatataaaaaataaatccataacaatcaatatacccaatcttatattatcatatacaactattaactctctccatactcttatttagttatctaattcataaatacacttacattataaaaattccttatatattattacatcaactatcactaattcatcctactacacttccaccatattctaatatctcccaacacttattattcaaatctatattattctataatttcacctaaat

SEQ ID NO: 1872 - DNA, 262 bp, Bos taurus
  Clone ID: 08-LIB3057-013-Q1-K1-B11
tcccactcgacccacgcatccgcgcttttttagacgcgcctctcctgtttctctccccgcctatccatctactgcaactcgtaaaattttcaggctcggaataccctgcaatctctatccaaacttccactctacctgctgtttctcaacctcccattccaccttaattcttatcatttccaaaaactactcacacataatcaacataatatctacaagcctaataacattacctattaatacaacccattcttagactatt

SEQ ID NO: 1873 - DNA, 460 bp, Bos taurus
  Clone ID: 08-LIB3057-019-Q1-K1-B11
cggacgcgtggggcgtccgcggcgctgattctgcgggagagccccagcatgaaagaagcagtatccctgataaatgaaatagatataggaagatttccacgactgctcacccgaattcttcaaaaacttcacctgaaggctgaaagtagtttcagtgaagaagaggaagaaaaacttcaagttgcattttctctagagaagcaagatcttcacctagttcttgaaacaatatcattcattttagaacaggcagtgtatcacaatgtgaagccggccgctttgcagcagcagttagagagcattcatcttagacaagacaaagcagaagcttttgccagtgcgtggtcttctatgggtcaagaaacaattgaaaaattcaggcagaggattcttgctccccacaagcttgagacggttggatggcagcttaaccttcagatggctcactctgctgaagcaa

SEQ ID NO: 1874 - DNA, 402 bp, Bos taurus
  Clone ID: 08-LIB3057-023-Q1-K1-B11
gaacaatgttttgagacagatgtcatatggagggaaatttggttctccacatctggatgagtcaggattttccccatcagctcagtcacataatcatacttttaaccagtcttcaagctcccagtggcgccaagatacaccatcatcacagagaaaagtcagactaaattctcatccctacgtgatggatagacattatagccgtgaacagcgttacagtgatctgtctgaccatcattacagaggaaacagagatgattttttctatgaagacaggaatcacgatggctggagccatgactatgataacagaagagacagtggtagaaatggaaaatggcgctcatcccgacactaacaaatgttataaggatttttcatagggtcattttaagtcctttt

SEQ ID NO: 1875 - DNA, 169 bp, Bos taurus
  Clone ID: 09-LIB3057-002-Q1-K1-C9
atatcttgtcgccataaaaacgtccatgtttaatatctcatatctccaaacttactataatacaatattattgactccttaatctttattaaaactgctctccaaatcattttatctaatctctttttaaactctccaatcaataccattcatataatttctttaatac

SEQ ID NO: 1876 - DNA, 105 bp, Bos taurus
  Clone ID: 09-LIB3057-003-Q1-K1-C1
acgatttcttatgacttccgccttcttgctaattacatcccaaatattacctcctacgggtacggtaataccatttagcaagcgtttacaatcttgcatagcttt

SEQ ID NO: 1877 - DNA, 457 bp, Bos taurus
  Clone ID: 09-LIB3057-005-Q1-K1-C1
ttcagtgattcctctgtaagatttcaatataaaacctgataatgaaaattagtttttatgatatattaccttattccagtaacattcattactcttatgtaaaatcactgatcatgacaaaatttatctttaggatcattataaaaacagaaggagtaacaaccttggatataatttaatggttttaaccaccttccaagtgcatctttcacttgaattaaggaaagcaggtaaaaataaaaatccagtctacttgtcttaccttctctatcttcctcccactgagttgaaccttagttgagaaaaaattctacttaccactaagtttagcaatcacttgatctttagcaatttcttttgtcttgcttctttaccaataagatatagagaatacacctaaccttaaaagattctcatttagattatcacttatgctggttactctgataattcctct

SEQ ID NO: 1878 - DNA, 379 bp, Bos taurus
  Clone ID: 09-LIB3057-007-Q1-K1-C1
gtcgcgagcggccccctttttttttttttgcttaaatactttttttttgcatgcaggaaaagctttattaagtcatagaactattataattttttttaaacagggatgtagaatactcaaacattttaaatgacctatgaaacaactggcatatatttagtaagcaagatccactttaacaattctctctgctcccaccctcaatgctcaactataggacattcatttatttatcatgtttagtatttctgtctcacagccatctgtcagaccttttgctgcaaaaacgtgttttttaacaattaaatacacaatggggagatatggttagacatttacaggacttgaaatgttgaaaaataatacacaataataggat

SEQ ID NO: 1879 - DNA, 143 bp, Bos taurus
  Clone ID: 09-LIB3057-010-Q1-K1-C9
ctagaccgcgagcggccgcccttacattttcttactttaatataaattacaatatcaagttccacgggaatgttttcaaagctttagaacatcaacctttattcaaaatttttacaattctcaatgcatttctagactttttt

SEQ ID NO: 1880 - DNA, 241 bp, Bos taurus
  Clone ID: 09-LIB3057-011-Q1-K1-C1
gacgcgagcgccgcccttgttttttttttttttagttattgattattggtacaaccagggtttagggacagaatataaatcccttcaaaaaaataccttccttgagttaatcaatggtaaaaggccgtattaaacggaaataatgcctaaacatggctcatgtttaacagaattacagattcatgaaaaggatgtgaacctatagcggaaaatgcattagtatttaagcagtgtacatgaa

SEQ ID NO: 1881 - DNA, 339 bp, Bos taurus
  Clone ID: 09-LIB3057-015-Q1-K1-C9
cggacgcgtgggcgcgccgtcgtccgtcaactcggaagctcgcgctcctcggccgtgggggcgagaacgccggcggcggcgagccggcgtcgtccgccgtccccagactgtggcaaacttcgcggcgtccccggagctcgttcgggcgagtctgataccttacaaaccagatcaaatccagtcccccctctctcccgccgccccccatcccaacccgaaatgccgccgctgccggcagcccctgcccactagccggggaccaacagcgccacagcgagtgagcgagcaaggaaggtggagagggagtctgtcttgaaagtgctgcttcctggtggctaa

SEQ ID NO: 1882 - DNA, 374 bp, Bos taurus
  Clone ID: 09-LIB3057-018-Q1-K1-C9
attgacggatggatccacacgtgctctacacgttgatacactacctttgctcttttattacttagaaacaacatactgtaaatagtctcacttttttataatgtttatacatataaaaatttaactcaactgctactcaaatttaaataaacaacttacaaattaattctactgaaaaaattacattattagtcaaaatttttgtcaatgctctatcacataatgacaatattttttatattgtagtgacaacaaaatctattactttacatattccaaataacatatacataccttcaatcatttttctcaaattttaaaaaggctttcacttattactcaaaaaatgaaattaatcccccctttggtctttt

SEQ ID NO: 1883 - DNA, 429 bp, Bos taurus
  Clone ID: 09-LIB3057-021-Q1-K1-C1
cccacatacccgtctccccgtattcctcgccaatggctgaccaactctttcagcgcaaaccctgggaccccgagcagcttcgcccggaccccgactctgactccgaaggcctgtttgacaaggctcctccggaagagccccccgctgtccgtgggcccaagtcggcttgggccgcgggcaggaaggccggtcggcgcactggcgggaaggcgcagggggcccgcccctggcagccgcctaagggcgcgacgcgcccccagccccaggaagaggcccctccattggatgaaggctgctatctcgaccattttccgcacctctccatctttatctacgcggccatcgccttctccatcacctcctgcatctttacctatatccatttacagcttgcctgataggcgcgggcgggcgggatgcgcgcagggc

SEQ ID NO: 1884 - DNA, 410 bp, Bos taurus
  Clone ID: 09-LIB3057-022-Q1-K1-C9
ttacccactcgacccacgcctatctcgagcgaccgacctcatatttattgatattttttttctccacatctttatgactcatgaaaatccttatcagctcaatcacataatcatacttttaaccagtcttcaatctcccattttctccaagatacaccatcatcacaaataaaattcacactaaattctcatccctactttatggatatacattatatcctttaacaaacttacaatgatctgtctgaccatcattacatagtaaacatatattattttttttataaatacagtaatcactatttcttgaaccattactattataacataaaatacatttttataaattttaaaattgctcctaatcttactcttacaaattttataatgatttttcataatatcatttt

SEQ ID NO: 1885 - DNA, 383 bp, Bos taurus
  Clone ID: 10-LIB3057-001-Q1-K1-C9
aagaagcgcggcgcccggccggtccttggagatggtccccggcgccgcgggctggtgttgtctcgtgctctggctccccgcgtgcgtcgcggcccacggcttacgcatccatgattatttgtactttcaagtgctgagtcctggggacattcgctacatcttcacagccacgcctgccaaggactttggtggtatctttcacacaaggtatgagcagattcaccttgtccctgcggaaccttcagaggcctgtggggaactcagcaacggtttcttcatccaggaccagatcgcgctggtggagagggggggctgctccttcctgtccaagacccgggtggtgcaagagcacggcgggcgggcagtgatcatctttgacaacg

SEQ ID NO: 1886 - DNA, 413 bp, Bos taurus
  Clone ID: 10-LIB3057-005-Q1-K1-C9
cggagaagatgaacttatgagagcagcaggatcagatggcactgacctttttgatcaggttcatcgtttggtcaactatgaatccatgctgaaagaatgcctggtgggcaggatggccatgaaacctgctcttcctaaagactatcatgaggaaaagaaagtcttaaatggcatgcttcctcagagccaagtgacagatacacttgccaaagaaggtcctagttctccaagctatgactggttccaaacagactctttagtcaccatcgtcatatatactaaacagaaggatatcaacttagattcagtaatagttgatcatcgggatgattcctttagagccgagacagttatcaaggattattcataccttgtacattgtgccctgagtcatggggatcaagttgattttt

SEQ ID NO: 1887 - DNA, 392 bp, Bos taurus
  Clone ID: 10-LIB3057-007-Q1-K1-C5
gtacggccctgggagcgctggaggcggctgtggcggccgcgactggaataactttacaaaagggaagataatttccgtctgccctttccgccagaaatggccaatgtgctctgtaacagagccagactgatttcctatctcccaggattttgctctttagttaaaagggttgtcaatcccagagccttttcaactgcaggatcttcaggttctgatgagtctcatgtggccactgcacctccagatatctgctctcgaacggtttggcctgatgaaactatgggaccatttggacctcaggatcagagattccagcttcctgggaacataggttttgactgtcacctcaacgggacggcatcacagaagaaaagccaggttcataaaacttt

SEQ ID NO: 1888 - DNA, 143 bp, Bos taurus
  Clone ID: 10-LIB3057-010-Q1-K1-C5
tcagcggagcgtagttttttttttttatttttttttattttttttttttttattggttgtgaattatttattgtatttatatttttattgttatatattttttaataaatgttttattattaaagttatattttatttactat

SEQ ID NO: 1889 - DNA, 434 bp, Bos taurus
  Clone ID: 10-LIB3057-011-Q1-K1-C9
caaaggaataggaaaacagtgccgtaacagaagagaaaattactttggcaatatccactgtactgtagccaaacaaaaggaaaaacaacttcccctcatggtgttaacagggcgcagtgcatttctagacttttggaccagcagcaccagcacagcagggtccattggctttccatattagcataggaatcatatcagtaatgctaaaaagaaagctgaacttctacacctaactggcagcaaaaaaaaaaaaaaaagaataaggcagtgtgaggtggtgtgagttggcattccacttttcctaaccaacttgtgtcagctactgtgtgcaggacccactggagagctgaacttctgtcctcactgaactgtaatgaagcaatacctggatgctactgcatgcctctttctccttccacagctatccccacacc

SEQ ID NO: 1890 - DNA, 233 bp, Bos taurus
  Clone ID: 10-LIB3057-016-Q1-K1-C9
tcccgctcgacccactcgtcctctcacagctgcaggagaatactttacatatctacagaagaacactataacccgggaaagttattgtaacgatgtttgatgaactttaaactccagccacgtatagcctatctcacaccacacagtaccctaactagacacataatcctattctaacctcaatttcttcatttaatattatactttattttcacactattaatttttatcat

SEQ ID NO: 1891 - DNA, 453 bp, Bos taurus
  Clone ID: 10-LIB3057-019-Q1-K1-C9
cggacgcgtgggtccagtaccagggctctgtgattacttggaaagaatttacttgaggtaatgtcactgtatttgagtgtttagacaagtaagagtgaaactcaggtacagttgaattttaaatatgcaagttagaaatgaagtctactgaaaaatttacattttgagtcaggttttgtgtcagtgctctagcagtttttgagaatgtgtttgatatcgcagtgtttgtaaaatctatgacggtacattttccaaacaacatatacatacctttaatgattatgctgaaagtagaaaatgttttacactctgtatacaaaaattgaaatcaacccctcttttgtgctttaagatgattttggaattaaacgagattattctccaatcattgttttcatgccatcacaaagtcatgtcacagcatcttggtccactcagcatttctgtgaaatg

SEQ ID NO: 1892 - DNA, 306 bp, Bos taurus
  Clone ID: 10-LIB3057-022-Q1-K1-C5
gtgatggagagtcggtgggatctctttacggcctctggactggaggccgagcgccctgccgctgtcgagccccgcgcccggcgtctccgcccggggtgctctccgcagtttcctggcttggaagcctcgggaacatggcgaggcagcggtggtttaacgggaaggacggtgactgttagcctgtgaacgaaagcgagagtgagccgcctcacgctcctgaccaagagtgatcttgaacttgtggctgctactagatttttgcccacaccttctcgtatgctgcggcttcttcactggagtggggcc

SEQ ID NO: 1893 - DNA, 402 bp, Bos taurus
  Clone ID: 10-LIB3057-025-Q1-K1-C9
ggagctttaaactatggactccggaagatacagtcagtagaagtcaagcttaggttaggtttaaaaaaaaaaaaaaaaggaaaataatctcaggaaaaaaatcaatattttttaagttattcgtactagttcccttacaccattaagcctcccactgtagttttcttcttgatgtgtaattctgccatttcgatttaaaaacattcagtgaaacttaaaattgtgagtttactagactgaagtaggacatgaaaataatgggcctttcctcctaattcaattgcttcattgacttgtgggagagggtgagacgccttacctaacctactgataaggtactttcagcaggaaatccaccttaattcatttccaatcaatcttcagtttgactcataagtcaaa

SEQ ID NO: 1894 - DNA, 231 bp, Bos taurus
  Clone ID: 11-LIB3057-001-Q1-K1-C3
gcggtgtgccaatccctgtagagtactgtctatgaaggggcagtggtttcttcttgaaatgacctcagggcagggtggagagggcactccatttgggctctggctgatagttaaatgctgagacacatgctgccatggccagatcttgtgctttcttcgaaaacctagaaatttagattttttaagttgaatcctttgctttttaaatactgctgattaattcagaaaatt

SEQ ID NO: 1895 - DNA, 441 bp, Bos taurus
  Clone ID: 11-LIB3057-006-Q1-K1-C3
gccacacttaaaaggaaccgctcactcaccaaggatgaaattgatgcttactgggaatgaaagaagaagatagaggaagaacaccttagagctatttccaacttgtcagagactattcaggctagcaaaagcacagaacctgagaagaagttgcagaagtcaatgaccatgcctgtgacccgtgcacgggactacttaaatatgggcatagacacaagtttggagcatcttattaagaaaaatggctggtggaccaagagtagctgggcatttctgaatgagcctccagtgactgaagctgtgtccaataagtacaaatcgcagtttcacgttacaagcatgggatcatcgatcaaaatttaacccccgagatggaattagtgcttgatatatatatgaatctaactaattactatataaaactactcaaccatatatgta

SEQ ID NO: 1896 - DNA, 326 bp, Bos taurus
  Clone ID: 11-LIB3057-007-Q1-K1-C3
cacagcttctctcctgagtgtgctaattcccaaaatgccacagctacatggtgttcggatctttggaattaataagtattgaaatgttttgaaatggaacaggaagttttacagctcctgagttttctgtaaggaaggagtggttagtaaactgcataatgtgaaatgagaggtagctacattggaaggccagttgctagttcttcataggctgttttgaaatgcagattcttataggaagatgtctctgtttaatgcatctggtatctttctgaagagaggctttatgggcaggctgggcaggcccagcttataagttaaatgtc

SEQ ID NO: 1897 - DNA, 397 bp, Bos taurus
  Clone ID: 11-LIB3057-014-Q1-K1-C11
ctttaagtgctatgtaaatctccccattacttatatggatataacggacttacctgaggaaggagagcacgcatcgcatggggagtggtaaccaaggtgaattttacaaactggtgtgtagtagatttaaatactcaaactaaatttaagtaagaaaagctaataattgtgacttttttttcccaagtgggaaaaaagaagaaagtatggttcggatctgaaagttaatacttatttacataaaacattctatttaaggtgataaattttctgatgaattttaatttcagagattatcttttcaccctatgcgttacagagaggtacagaaaagttcgggacatttgggggctgctttttttcctatagacaaaaaatgacattggctttcttacta

SEQ ID NO: 1898 - DNA, 358 bp, Bos taurus
  Clone ID: 11-LIB3057-017-Q1-K1-C11
ccggattccctgtcgacccactctttctcggtactcttgttcggactcttggtgaataaactgaagatacaaaaacttatttccctttaagaaattctctcaaaaaagaaatgcagataaaagtattaacacatcaactactcaaaaccattacctgctattatcatctgaaggatatactaccatatacacaaactgtctaactaactatatcaaaactctacaatttcctcacacacctttttcatttacaatcatataaactttgaacctgattcctgtcccatgctctacctattcactttcccacagaaagcttatataatctttcactatatttagcatacattataacatt

SEQ ID NO: 1899 - DNA, 486 bp, Bos taurus
  Clone ID: 11-LIB3057-018-Q1-K1-C11
ttcccgaattgacggatcgactccacgcgtgtcgcggacgcgtggatccaataccattgctctttgattacttggaaagaatatactgcatgtgatgtcactgtatttgagtgtttagacaactaagagtgaaactcatgtacagttgaattttaaatatgcaagttagaaatgaagtctactgaaaaatttacattttgagtcaagttttgtgtcagtgctctagcagtttttgagaatgtgtttgatatctcagtgtttgtaaaatctatgacggtacatttttcaaacaacatattcatacctttaatgattattctgaatgtataaaattggttacactcttttttcaaaaattgaaattaatcccctcttttatgctttaatataattttggaattaaacgatattattttttcaatcatttgttttatgccatttcaaaaatattgttacaacattttgtttccattcaacaattttttt

SEQ ID NO: 1900 - DNA, 223 bp, Bos taurus
  Clone ID: 11-LIB3057-021-Q1-K1-C11
tcgccccagtggattgggtgggcatttcaaactcagctgagccacctttgcaagagtagagactcctaaaacagggatgcttcaaactgcctgctccattttttggctcaatttaactccctggatatggagaatcacatcttatgggtacctaagcaactttggcagtgtgtctagggcccctgtgaaaggaaaaaataaatgaagttcagttcagttgctc

SEQ ID NO: 1901 - DNA, 433 bp, Bos taurus
  Clone ID: 11-LIB3057-021-Q1-K1-C3
cccacatacccgtctccccgtatttctcttcaatggctgaccaactctttcagcgcgaaccctgggaccccgagcagcttcgcccggaccccgactctgactccgaaggcctgtttgacaaggctcctccggaagagccccccgctgtccgtgggcccaagtcggcttgggccgcgggcaggaaggccggtcggcgcactggcgggaaggcgcagggggcccgcccctggcagccgcctaagggcgcgacgcgcccccagccccaggaagaggcccctccattggatgaaggctgctatctcgaccattttccgcacctctccatctttatctacgcggccatcgccttctccatcacctcctgcatctttacctatatccatttacagcttgcctgataggcgcgggcgggcgggatgcgcgcagggctgag

SEQ ID NO: 1902 - DNA, 420 bp, Bos taurus
  Clone ID: 11-LIB3057-024-Q1-K1-C11
gcgcacgctttaaactatggactgccctacatacagtcagggacaaattccactgggtcttgtttgatcccaccaggctggtgtcgacagactgcctgatgacccggccctgggtgtgcagcaagatggcctacacgtgaggtgggtcacaccagaggccaccctgcaaccaggctccgagacctgctggcccggggccccactccaaggcaaagcatcgaggaggatgctctctgcccctgggtgctctttcccaacccctgagtcctggtccctggtctccttggccccaggcaggtcctgtggctcagcaatcaactcccacgagctcagtagtacagtaggcacctgtcctcagacacacacgcacaccaacgcacttgcttatgcacacatgtgcacacagcgcccgctcaagtt

SEQ ID NO: 1903 - DNA, 365 bp, Bos taurus
  Clone ID: 12-LIB3057-001-Q1-K1-C11
cggacgcgtgggcggggatggagagtccgtgggatctctttacggcctctggactggaggccgagcgcccgcccgcggccgagccccgcgcccggcgtctccgcccggggtgctctccgcagtttcctggcttggaagcctcgggaacatggcgaggcagcggtggtttaacgggaaggacggtgactgttagcctgtgaacgaaagcgagagtgagccgcctcacgctccggaccaagagtgatcttgaacttgtggctgctactagatttttgcccacacctcctcgtatgctgcggcttctccactggagtggggccagggtgaccgtggacttgccgcaggtcagacggctgcaggtcaca

SEQ ID NO: 1904 - DNA, 225 bp, Bos taurus
  Clone ID: 12-LIB3057-001-Q1-K1-C7
tcgggctgctgcaggctcggtttcttctttcctgctcgtctgtgtttgaggagccacggctgctaagagaatcatgggatgatcgcaccgagacccaacaagtgaaagctgcaaatcaccaccagtccgcagagcataggaggagggtcgtcgaatccagggagcggtcgcctgctccctgggcgcgctatcaccctgcggcactgtcttctagcataagccacc

SEQ ID NO: 1905 - DNA, 246 bp, Bos taurus
  Clone ID: 12-LIB3057-003-Q1-K1-C7
gctaaatcgaaagcggacgctcattcttattaatttacacacgcaaaatgcgacgggggtacttacaaattcaaggggtagcttgcaatgagattagcaataacctgatgaggacaactcaagaccattacaagcactatacgcaatacaaatgctccagaaagactctaaatgctacatgaaataccagtcaaaaaattaaaaaccgcacctaaacaaatctaaaataactaatacagagtttcg

SEQ ID NO: 1906 - DNA, 177 bp, Bos taurus
  Clone ID: 12-LIB3057-004-Q1-K1-C7
tctagatcgcgagcggccgcccttttttttttattatggacattaaaagttagtatagtttattttaaaggttggttattctatttgtggttttaaatatacttttgttccatttttttattttaaatttattttgtttaaattttcctatcaatttccatttattttttctagacc

SEQ ID NO: 1907 - DNA, 410 bp, Bos taurus
  Clone ID: 12-LIB3057-007-Q1-K1-C7
ggagagtcggtgggatctctttacggcctctggactggaggccgagcgcccgcccgcggccgagccccgcgcccggcgtctccgcccggggtgctctccgcagtttcctggcttggaagcctcgggaacatggcgaggcagcggtggtttaacgggaaggacggtgactgttagcctgtgaacgaaagcgagagtgagccgcctcacgctccggaccaagagtgatcttgaacttgtggctgctactagatttttgcccacacctcctcgtatgctgcggcttctccactggagtggggccagggtgaccgtggacttgccgcaagtcagacggctgcaggtcacagcaggtccagtctatccacctttgagcggcggcggcatgtccttccccaccctcgatgaccccc

SEQ ID NO: 1908 - DNA, 411 bp, Bos taurus
  Clone ID: 12-LIB3057-011-Q1-K1-C11
gaggagcccgggaaaggttagagcaggtgggtgagttattagatggtttaagatgacttgagtccatcatgccttttttttttttggcagttgtcctcccctttgtttgaaattccatgagtgacttgtctttccctggaaaaaggattaggagagtggtccctaacaactcaggctgcctttggttggttgtgtttttgtcggttcctttctctgtacctcgacttacctcgaatcagaatagcaagcccaggcaggtggaagaggcatctctgcttggcattgcccaatctaaccagggaggctggctgcccaccacctctgtccactggagcggaggcgccggcaggtgtcagtatgaactcaggaatagacatgaggcctttaaaagagagagaaaaaaatccatga

SEQ ID NO: 1909 - DNA, 444 bp, Bos taurus
  Clone ID: 12-LIB3057-012-Q1-K1-C11
cggactcgtgggcgacccagaagctattcgtctacaaatcgtttagcaccatgcgcgccagtaacatgctcagcgtgacgtgtccaatatacttacaactttaccagattacctcttgctgtgtgtacatacaatatctatatatcttaccccaaaaagcactacatatggaatcacataagtatcgaagaatttttcactgtaacaatttactattcactgtttattgagaaattgttttttattatttaaaataacattatcttaagtgtttaactcttatacagaaagaaagcttaatataacagcttatataacttgtactactaaatatgaaaatatatcattttaaaataatacaacatgtaaaatttgatcattcattaatgtaattgtgctatgtttttacaatatttttcctacacattttttatacttcaattt

SEQ ID NO: 1910 - DNA, 373 bp, Bos taurus
  Clone ID: 12-LIB3057-014-Q1-K1-C7
cttccgtcaaaaatagaatttggcttttttttttctttttaaaataagtgcttacaaatacaggtagaaccgtttctgctttgccaagtgctctaaaaaagcagcgcaagtcacagcctacattgaacggtaactgtcaccagaataaagcacaaagatatgctaataacgttaacaaaagaagaaaatgcttttataagtacataccttttgtcgtcaaaaaaaaaaatagaaacacatgtattcaaaaaaatcaaaattatacagccatgtttatgaagtctacatttcccttgtcttggatatatatatatgtggagatatatatacaattcaaggcatttttattaagattaatcatttggtttttctg

SEQ ID NO: 1911 - DNA, 208 bp, Bos taurus
  Clone ID: 12-LIB3057-015-Q1-K1-C7
ttccttacatactgtgataagttgttgttgtattacatgtaataacatgccttgattagatttaatgccttatatgaattgttagaattaagcattgttttagatagtccaataagattcataacataggctgtataaaattagccttcaacttcactatcaagcacaagttaatggcatgaaaacattttcagtctctctgtaaagt

SEQ ID NO: 1912 - DNA, 380 bp, Bos taurus
  Clone ID: 12-LIB3057-021-Q1-K1-C7
cgttctagatcacgagcgtccgcccatatttcattctatagctaaccaactctttcagtgggcaggttttaactccctgcaggtccacctataccttactcttattacctattcattttattcctaattaataaacttttaactccactccctttattcatccaattcttatctactataaacactatccaaaatctcaaatttcccgcccttgtcatttacctaatgtcgctactctcccccaaccccatgaagaggcccctccattgtatgaaggctgctatctcgaccattttccgcacctcttcatctttatctactccgccatcgtcttctccatcacctcctgcatctttacctatatccatttacagctttcc

SEQ ID NO: 1913 - DNA, 423 bp, Bos taurus
  unsure (56): Clone ID: 12-LIB3057-022-Q1-K1-C7
cggacgcgtgggctgaggcgctccaactccttccttcggttgtcgcctggtgcggncgccgagccgacgccgcgagcatgtctggggtgcgcgctgtgcggatcagcatcgagtcggcctgcgagaagcaggtccaggaggtgggcctggacggcaccgagacgtacctgcagcctctgtccatgtctcagaacctggcgcgcctggctcagcggatcgacttcagccagggctccggctccgaggaggaggaggcggccggcgccgagggcgacgcgcaggattgggcgggcgcggggtccagcgctgaccaggacgacgaggaaggattggtgaaatttcaaaccctcctttggccctgggattcagtgaggaacaatttgagaagtgccctgacagagatgtgtgttctctatgatgttc

SEQ ID NO: 1914 - DNA, 231 bp, Bos taurus
  Clone ID: 12-LIB3057-024-Q1-K1-C7
gcacgtgggaccacgtaaagacgtctggttgagctggaggtgtacgggacctcaatgtctatggtagacatttcataaggattctctgccaagagtggagtaattcattcactggagtttgatttcggctttgcatttttaaagttatctgtctgccatgtaagaaatgtttgattggaaccaccaagaacttggtaacataatatggggtgaggggggtgaaggtgatga

SEQ ID NO: 1915 - DNA, 401 bp, Bos taurus
  Clone ID: 12-LIB3057-025-Q1-K1-C11
cacggagggagccctggattggcctgcgcagagtgggggacgaattccactgcgtcttggtggagcccaccaggctggtgtcgacagactgcctgatgacccggccctgggtgtgcagcaagatggcctacacgtgaggtgggtcacaccagaggccaccctgcaaccaggctccgagacctgctggcccggggccccactccaaggcaaagcagcgaggaggatgctctctgcccctgggtgctctttcccaacccctgagtcctggtccctggtctccttggccccaagcaggtcctgtggctcagcagtcaactcccacgagctcagtagtacagtaggcacctgtccttaaacacacacgcacaccaacgcacttgcttatgcacacatgtgcacac

SEQ ID NO: 1916 - DNA, 267 bp, Bos taurus
  Clone ID: 13-LIB3057-002-Q1-K1-D9
taattgtacctatacatcacacgttcattatatctaaatctctctattatattctaatacctcttcatataaaaagaactgtttaaatttaattaactcaattcctaattttcctacctactattcaaccaaaccacatcctaactaactctcttacctcaatcatctcttaaaaaatacccccttaaacttaactctaatatatcactttatatatacattatatatttttaaaaaattttattccccacattctcccccttttat

SEQ ID NO: 1917 - DNA, 65 bp, Bos taurus
  Clone ID: 13-LIB3057-004-Q1-K1-D9
cccggtcggaccaagccgtccgttaaaagctgcctgtagttaaaaattaaaacctttcaagtgtc

SEQ ID NO: 1918 - DNA, 426 bp, Bos taurus
  Clone ID: 13-LIB3057-005-Q1-K1-D1
ttttgaagttggcacataacattttttaaaaagcagtctttgtcttctgcttcttccttatggatgacttatgaaaatatatgacgggtataaaacagattagctatactgatcatatcaacactgtaactgttgaaatggcattatgatgtttcttttttgttgggacaggctgtgtgatgcatagagcctctttcatgtgaaatgcgtctgctgcttatatgtttatgctgtgttgatgataatatattgacatatgatactgtatatgtgtgcctgttgtgtgaagaatgggattacaagatgtatgagtataacgacttgctaaacttttcaggacccaaagttccaaaagatgaagacccaattttaattaaaccacttattaatttccaaaaaaaaaaaaaaagggccggcggtctaaga

SEQ ID NO: 1919 - DNA, 432 bp, Bos taurus
  Clone ID: 13-LIB3057-006-Q1-K1-D9
gttctagatcgcgagcggccgcccttttttttgatgcataggtacaatgtacgaagcggggtggggaaactaagacggtacctagacattaactgcacttggaccatagataaaactcatgtttctagcttaaactctactgatgatgtatttaaactatgcaacattgaatcggatacaactatcaaaggctaaatgatacatgcactagccattgacatgatttaatagctttagctggtaacaaactcggcatatgtaacaatgatgaaagtaccattttcaaagctagaaaccgattgagacataaattatttgaaagtcagaccagttgaacctttcagatgactgactctgcaagcatttttgtcatttaatctgatgatgatgatgatgatatatatatatataacactttccctaacactcttt

SEQ ID NO: 1920 - DNA, 428 bp, Bos taurus
  Clone ID: 13-LIB3057-008-Q1-K1-D1
ccagtctccagcttctcctgcatcgacaggagggttctttaccactgtgccacctgggaagccggagatattgtcgaagactgtggctctctagaattccctgaaacacttggagctttagaggtagttcatccctcatcctccttattaaaagttagtactttcccctgcagaaagaaaagagaggggaaagaaactcttccccaggacatgtccccacctttctactgaacacctccctcagaatagccctgctgaattcatgttgggtctgataaaaaaataaaaaagaaagaaagagattatactccaagacagttgcaaaaattaactagcattttattcacaggagcaggggagtaccaatggaattagatcttaaggatgcttgatcaagaaaagaagaacataagagcaaataagaaaat

SEQ ID NO: 1921 - DNA, 192 bp, Bos taurus
  Clone ID: 13-LIB3057-013-Q1-K1-D1
cggacgcgtgggtcgcgagcggccgcccttttttttttttttttgtcagggttgttgaagttttaataacccctgggcattaagccttaaccctaaattctaacctgggttgaaccaactgtcacccccggccccccaacccttgccaagtggggccctggccctttgtggtgggccccgcccggcccggcc

SEQ ID NO: 1922 - DNA, 328 bp, Bos taurus
  Clone ID: 13-LIB3057-014-Q1-K1-D1
tcgtctcgccgaatacctagtaaattgattgtaaacttatgcagcacttctttattacaactctaatatgccctcagcgcggtcgagcttaacagcgtaacgagtcactgcatagacacgctattagattcacgctaatcgcgacggagctactacttgtcactaatacacgcattagcatctactaacatgctcttaattacactatcacacattcttaatacctacttaactaatgtctatgagttgtagcatgtagcttattaatctcaagcactaatgtcattcacttctccatgagtcagccctatatactgcatttgacaac

SEQ ID NO: 1923 - DNA, 325 bp, Bos taurus
  Clone ID: 13-LIB3057-014-Q1-K1-D9
agccttccggattgtttgcaaattaaccccagccttttgaaattgcaacccaagttccggttccaggtttgggttaaggttgccccaatcaataaaaaggtaccccggaaccccggttttgatgatctgtcagggaagtataatcctgaggtgttcgataaaacgtatcaattcctagatgacatccgagccagagagaaagtagctgtgaaaaagcagctgaagaagcaccgttcaagggaggagcatgaaaaactacagcacctgcttcagcgaatggagcaacaagaaatggcccagaaagaacgaaagcggcaacaagagc

SEQ ID NO: 1924 - DNA, 411 bp, Bos taurus
  unsure (191): Clone ID: 13-LIB3057-016-Q1-K1-D1
cgccctcacacctgaccgctcttgtcgtcttagtccgcttacattctgctcctttctggtccggtcgcccgtattctatctgctcagactctggtctccccgccctctctcacttccatcccctctcccgactctaaagcgtccctttcttggcatccagccgcccccacacccggcactctgggcgcctncggctacccacctcttcttcaccccctcttcgtaggtttttccagcctcttcagctgcttcttggcctttctctgttgttgtactttgcatcccttccgaatcacccccaaaccttttgccttgtctccaccgaggtcactatccccatcctttttttcccattgctgcttcttccaccggtgccccccgcccccctccgctgcgttgtcatggtccatt

SEQ ID NO: 1925 - DNA, 98 bp, Bos taurus
  unsure (33),(36): unsure at all n locations; Clone ID: 13-LIB3057-017-Q1-K1-D1
gttctagatcgcgagcggccgcccttttttacnaanagaaggggtaactgtcaaaccggggacattaaacccggggaaaccatagcaacaacctacca

SEQ ID NO: 1926 - DNA, 272 bp, Bos taurus
  Clone ID: 13-LIB3057-017-Q1-K1-D9
cacatatcaactctttcattccctacaacctcttcacattaccatattctcccatatcgtctcaccctcttttaagttcctatcatcttccaacaattatctacatatatctatctttatcttatctactacttttatctcctaagccaaataagaaaattagaatcccatttttacctttcaaacccatgacagtcccttctacatcatattctacacctatcgacatcttcttattccttctaatttttaaattaaaacccttccttttt

SEQ ID NO: 1927 - DNA, 382 bp, Bos taurus
  Clone ID: 13-LIB3057-020-Q1-K1-D1
gatggtttctgtgaccagcatcttgaggtcaggtccctggggccctggcccgcagcgggactggtggcccaaggggaaggacaggacggaaggaaccaggcatgtgggggttctggcgaagagaaggggtcgggggagggggtgtggagtggggttcaggaacatctgcacagctgggaaaggcctaaaaggccttttgcttgctccgcacgcatcccctactttccagctctcagacctgaactgaggatggagggaacgtgcccaagaatggaccgcccccccccagagcacatgggaaggtggctggcctggggctgtccccaagactctagtcagtgccttcagcccacctgtgggagcctggaatttggggtggggg

SEQ ID NO: 1928 - DNA, 185 bp, Bos taurus
  Clone ID: 13-LIB3057-022-Q1-K1-D1
caacttcttccttcggttgtcgcctgtgtctttcgccgatcctacaccgcgagcatgtcttgggtgcgcgctgtgcggatcagcatcgagtctgccaacaaaaagcaattccaggatgttggcctggaccgtaccgaaacgtacactcaaccgttgtccatgtctcataacctggctcgcctgac

SEQ ID NO: 1929 - DNA, 322 bp, Bos taurus
  Clone ID: 13-LIB3057-024-Q1-K1-D9
acgctaaaaacaccaaaacgcctagaaattccacacactgcacactaactcaactgcgtcttggttaagcccaaccttctcttgtaaatagactgcctaataacatcgccctatttctacatcatgatggactataccttaggtgtgtaaaactacattacatcctgcatcacatactcctagacctatctgacctggcccccaactccaaggctcaactactcataagctccattatgcccttggttactctatgccatccccatatccatcatccctgttcataaactccccactcacatcctgtggctcatcatataac

SEQ ID NO: 1930 - DNA, 247 bp, Bos taurus
  Clone ID: 14-LIB3057-001-Q1-K1-D5
tcaaaagacggtattgtcgaataggaagaatcagcagcggcgcctaagaggggacccaaggtcatccggggcgccgaattgattacgggaatcggtaagcactcgaggtcgcatatgtaccacaagaggtgcatctgtagctatcaaaggtcactatactagtgccgaatttaactagtcacgaccgcaaacccaaacctgaaactctcactgataaaccatccaaattttacaccgctgatgatgt

SEQ ID NO: 1931 - DNA, 188 bp, Bos taurus
  Clone ID: 14-LIB3057-004-Q1-K1-D5
ttcccacctacacccactcatcctaactatcatatctttcttctaataatcttcaccaccatacacaacaaaaaatcggtctgataaattatcaccgtctactcctacttctaatattatcaaatctactcttataccattaatttattctccatttttttttattctaattttcctttcaacttata

SEQ ID NO: 1932 - DNA, 237 bp, Bos taurus
  Clone ID: 14-LIB3057-007-Q1-K1-D9
cgacccacgcgtccgtctcacttacagattcgatctttcatttgacctacaaactcatatatactatcgtggcgcatactctatagtcccgttactgccatcaatcacaccgcacatctccacgacatcctatctataacgctctaatatgaatgacaaacagatactattgtcaatcaaaaccccgtagaccatatccaaattcaagggtataactgatcgcgtgtttactgtaaa

SEQ ID NO: 1933 - DNA, 423 bp, Bos taurus
  Clone ID: 14-LIB3057-008-Q1-K1-D5
atgactcatgtatcgcgagcggcgcccttaataacgtattgataagcaatataagtgaaggttcctctcacccctgacttcctggttaaggaaaaaaaaaagatatgggttttgaaagtgatagtgatattttcagaagataactggcttccctggtcatgtcccattgtgccatctgagtttgataatggatctgccctcatctctcagcttctccaagcttccacctgctatatccttccttttcccattgacagcctccacccaggcaccatcagacttaagaaaaagaatagtcgatgttaatcagatttgggccttatggcagtttttacctgagccccaagttgtatattacagcttccggctccaaagtcatttctcagcattgagggaagaaacaggaaggagtgctctgtgaat

SEQ ID NO: 1934 - DNA, 174 bp, Bos taurus
  Clone ID: 14-LIB3057-008-Q1-K1-D9
gtacacggttccggaatcttccggatgcgacccatcgcgtaaccgtcgactttacaactggagacggaccatttggaatctcgactgtattatattaaaacaagaggggtcgctcaaggccacgtggacgggtgattgacgctgatgtcgatttgctgcccagtcgctcttgaa

SEQ ID NO: 1935 - DNA, 213 bp, Bos taurus
  unsure (12): Clone ID: 15-LIB3057-004-Q1-K1-D11
gggggcggccgnctttccggccgcgcgccgtgtcccgtgacgaatggctcttcgcaccggaccccggtccctactctcggtgttatctcgcctctcctctcttctgtatacttgaccaactgttttccattggggtctgcgtattacttgctgtcctatgcctaactatgctccctcgctactgtcttattcgttacatctggtcgtattttt

SEQ ID NO: 1936 - DNA, 245 bp, Bos taurus
  Clone ID: 15-LIB3057-005-Q1-K1-D3
cacaattatcctcatttgatacctgatctctgcctctcacagcaattctatgaagtataggtgttgctcccatgaacagatgaggaaactggaaagagtatgattacagtggctttataaatggaaggatctgtcaagggtatgaggaaggatgggtactctaaagcagaggttggcaaattatggcctcttggataagtccacctgttgcctgtttttgtaaataaagttttattggaacagcc

SEQ ID NO: 1937 - DNA, 434 bp, Bos taurus
  Clone ID: 15-LIB3057-006-Q1-K1-D11
gacagacaagtgccaaatgctctctcaaattgtcagtagtagaaaacatgataaactaggcacagaaaatgatgtgtttctttccagactgtttgaatcatacactcatatgtatctacatctatatataaaaagaaacaaaaccctttccttgttcatacactaaccaaatctctcacagtctgaattattccacccatttctgtttctccatttattataaattgtgtgctcctaatttagtgtgatataccgacttgtgtataacggattttcaatgacatacctgccttgctctggtgcttaggagaccataaactccctccattggtaaaagagctatattagagctcctgaatagagaatgctacactggaaaggattggggtactatttagattgttgtattaattggcaatgtatcctacaagctg

SEQ ID NO: 1938 - DNA, 144 bp, Bos taurus
  Clone ID: 15-LIB3057-007-Q1-K1-D3
accacgcttccgaccactacatacacttcaaccaaaacaagttttgatgctctacgagagggttgaagatgatgttctgaaaggaccgctttacctcaaaaatgatatctatatgcacaatgccatatactgaatatagactat

SEQ ID NO: 1939 - DNA, 101 bp, Bos taurus
  Clone ID: 15-LIB3057-015-Q1-K1-D3
taacacattatttaccaacttcataacaaacactttatataaacccacctattattaatttaacaagcacatactttcaaattcttataacctcttaccca

SEQ ID NO: 1940 - DNA, 258 bp, Bos taurus
  Clone ID: 15-LIB3057-016-Q1-K1-D3
acacagttcacaacagtgttgaatggtgtggacttcgtgtttccattgtgctgttgtccgttgtgacagctgtctcatgttgaggtgttgtgcgagtggctgttgaagaaagtttgcagtgtggcagcttttattccctgtgcaacaaaagcttataacctgctaaagggatatgaaaataaagctgcaaagagtacaaatgacaattggccatgcttatttacactatgattcgtttccacgcttccatttattaac

SEQ ID NO: 1941 - DNA, 275 bp, Bos taurus
  Clone ID: 15-LIB3057-017-Q1-K1-D3
ggcgtatcttgttagggaagccttgtatctttatgaagtaatgggtgctcattgtacggcatggaaaaataagggatataaaggagtgagtgggtggacagatggagtattctttaacccctgttaacatttgggcacatttcctttccttatattcatttattgagtttgtttttaaaactgagatatagcttacataccatagtatttgcagttttaggggtttttagtattttcacaaggttgtataaccatcaccactaattccagagttt

SEQ ID NO: 1942 - DNA, 379 bp, Bos taurus
  Clone ID: 15-LIB3057-019-Q1-K1-D3
ggcccctctcactgttagaagagttctgctgccagaaactggtctccatgtttgtgatccatcagagtgtggcagacttcctggtcctgtcccctctcacctaaatatctctttgtcattgaaggtaaagaatgacaccttttgacataaaacttgagccatttggagatttactcctcacactgcagtatttgaatctttccatttcctcctgcttaactcaccttggtggtgaaaagagaccagaagcatcttttctataatgttaaaaattgcggacagaacttatcatttaaagacaaatattctaaaatgtataagcccgtaattctggccccaccaagggagcttcaaaccttgatctctttctttttttctt

SEQ ID NO: 1943 - DNA, 190 bp, Bos taurus
  Clone ID: 15-LIB3057-024-Q1-K1-D3
agactcttctgcaagtaacatctcgatttctgcccaaggagaaccccaagttcaggtcgaacttgttttgatttttcataacctcactgaccaacctacattcgtaaaacgacatctaactcacaaataccatatgcagtcagcaaacaccctctcttgactcctcatactcattgctcattataacttc

SEQ ID NO: 1944 - DNA, 257 bp, Bos taurus
  Clone ID: 16-LIB3057-001-Q1-K1-D11
ggagccgttgacgccttgcgtgggttgtggctcccgcgcaggcgcagacgggccggcccgctaaggcggggccgcggcgggagccgccccacggatgaaggtgggccgaccggacaggactgggccccacagcatcgaccccttagggagcagctgtgagcctatcacgcggagggatgacctatctaggcgatgacaccctgtgagcggaagagatctgtcagcatgcaaacggtcgggcactatgaacacacgct

SEQ ID NO: 1945 - DNA, 164 bp, Bos taurus
  Clone ID: 16-LIB3057-004-Q1-K1-D7
acaatcccaacatacccaccattaaattcatatcatcttaattctatatttacatctctccattaaattaccctctctatcatctaatcacactaatacaattcattaaattaaccccatatactatcctatccaattccatacaattttattaacaaaacaaa

SEQ ID NO: 1946 - DNA, 437 bp, Bos taurus
  Clone ID: 16-LIB3057-006-Q1-K1-D7
ggcatctcctgctttgccagtcttgcgcctccgctccctcctctcccacctgctccccgttcccttgtcccgctctctccagttcttctccctcctcctactactcctccagcacacccaggctcactcgtaccagagccaagaggctacacgcccagccgtctacgcggggaactgctccggctgggagacaacttaagggcggcaggttgggtaggtgcgggaggagtttcagctgcgagaaccacgatccaggaggtccggagtagcatggcccggaaaagcgccttccctgccggcgcgctctggctctggagcatcctcccgtgcctgctggtgttgcgagcggaggtcgggcagcagccggaggaaagcctgtacctgtggatcgacgctcaccaggcgagagtgctcataggacttgaagaagatatctt

SEQ ID NO: 1947 - DNA, 373 bp, Bos taurus
  Clone ID: 16-LIB3057-007-Q1-K1-D11
cccacgcgtccgcccacgcgtccgaaaagaagcatgagacggggtggtgaaaggtgaagagaagaagaagagtgaaacgcaacgctcgcagagcagtgtcgaacgaacgacggtgccgttcaaccttgcaggatttgcctttcatctatagattgttgattaattaaaccccaagacttcttcactccaactaccacgtctgttgcaaaatcctctggatgaaaaatggatgatggccaccaacacgaaaacagcaggcataagatggaattctacagaggagcacgttccctgtggaatactgattcccagcatcaagtaaaagagccaaatgcactagttatgaataagaagattaggtccattatggctg

SEQ ID NO: 1948 - DNA, 435 bp, Bos taurus
  Clone ID: 16-LIB3057-011-Q1-K1-D11
gaggaggcgctcacttccgcatcgggccaggcggcgtccggctgcggcggcgcccacggccaggcgggccgcagagggggactgagatcactttgtgttgcagtttctgaaagtatttcaaggcagaactgtgggtgttggagagagcaatggaaggtcacaaggcagaagaagaagtgttagatattcttcgactgaacgtgggtggctgtatttacacagccaggcgggagtccttgtgccgctttaaggattcaatgctggcatccatgttcagtggtcgtttccctttaaaaacagatgaatcaggagcttgtgttattgaccgtgatggacatctatttaaataccttttggattatcttcatggagaagttcacattcccacagaggagcaaacttcggttgctctgcaggaagaagctgattactttg

SEQ ID NO: 1949 - DNA, 250 bp, Bos taurus
  Clone ID: 16-LIB3057-016-Q1-K1-D7
cggacttcgtgcgctagatccgcgagcttccgccctttttttttttttttttttgtttggttattatttatagtttgattttttttatttttcacttataaacattaacatctactacaaaatctcattttatctaaaaataaacccattataaccaaaatttcattacaaaacttaaaaacacaaaaaatatttcccataaattaatcattaataaccaatacacaaatacatattattaattttttct

SEQ ID NO: 1950 - DNA, 423 bp, Bos taurus
  Clone ID: 16-LIB3057-020-Q1-K1-D11
cggactcgtggggtccgagatgtcactggcaagaagagccaaactaattttctgaggaatgatcctcctccaattttaactgtttccaaaagccaaggaaaaataagcattcttttggaaagcttcataggcaaacttccttcctccgcatccccaaccccaaactataaggtcaagagtataagcaaaggacttcaacggtcagaccagagtagaggttatgggaaacagacatataatttcgcgtattttaccatgcgttgagttccctgagaaagtttcattctgtgggggctccggtcggtaaaactttctgtgaaatcggctgcagagccctctgctgttgaaattctagtctctgggttctaccacgagtttctggagacccttactccacaatttccactaaggacataacttcct

SEQ ID NO: 1951 - DNA, 82 bp, Bos taurus
  Clone ID: 16-LIB3057-021-Q1-K1-D7
tcccggtcgactccacgcgtccgcttgcagaagctgtctgtagatccctagtcgatttctgcctcgtcctgacacctaccag

SEQ ID NO: 1952 - DNA, 280 bp, Bos taurus
  Clone ID: 17-LIB3057-005-Q1-K1-E1
tctagatcgcgagcggccgcccttttttttttttttttgcaagttgtagctttatttactcagttcaatccagggcaactgtttttaaaaaatccatatataggacggggcaagggcggggggcagtgtacaccacatgtggtctccatgacgtcatgcatagtgcatttctcagcacaagacagataaggtctgtagatgcgcctcaatccactcaggcttgtgtggttttgtcctgcacagaccttcctagaaaactgaaatacattctgccctggca

SEQ ID NO: 1953 - DNA, 386 bp, Bos taurus
  Clone ID: 17-LIB3057-008-Q1-K1-E1
attcggctcgagcgctgatgctttaccatcacatgcaagtggtcatttgatgtgtcggtctttctctgctgtggggggtttcaaccctggtgtgccggcccaggcgttcaatcctgtccttggaccggcgtcgactgcattgattaatcaagcagctgccttggctcttgccaatcttcttccagggcttgttgctgcccccgttaaccagagagcaccgactgctccatatgcgaatcaacctgctatggtgtatgtcaaccatccaacaatgctacccggataccagactacttatatgggacagaccattggtgttagacctcatcctggtgctggtgctccttacatgggtcatttcataccctcatacgatgcattaatca

SEQ ID NO: 1954 - DNA, 310 bp, Bos taurus
  Clone ID: 17-LIB3057-014-Q1-K1-E9
tccaaatttttttcccaatgttttagccacattaactgataagttgtaaatggcaagagtgaaagagtcacatgtgcaggcattaggaacaacattacccagctgcacataatccatgttctcattaaggctcctacttatattactcactggtcattaacactcagtaatattgacattgagaatctctctgtcatgcactaccatcttcatattcaatactatctgactctttcccagtcttacctggaagaactgtaatgaactgaaggctatgtaagactgtattaagggataaatgttgtgaata

SEQ ID NO: 1955 - DNA, 324 bp, Bos taurus
  Clone ID: 17-LIB3057-018-Q1-K1-E1
tcccggtcgactcacgcgtccgattttgcatgtagccagcaatttgaaatctgctggtgacacagagggacattttgagcaggtcaggagtgtttatagagagagcatccccacagcgtgtgcatcttacactgacacacattgaggagtgagtgattctgaacgccccgcagaaaaagcagaggtagctgaacactgacgctggtcctgaaatggtatttctggcatctggcttctctcttctaccccagtaaaaccatcattagagtttaacaagttgcaaaataaatcattttgaaattggtaatgttggatatttgactg

SEQ ID NO: 1956 - DNA, 271 bp, Bos taurus
  Clone ID: 17-LIB3057-024-Q1-K1-E9
gctccgagccccgggaagtgagcccagaaatgatcacaccactgacagccctgagcggggttgggaaacttccccgctggatccgcttgaccaccccgacactgggctggagtccatgggtggtgaggaaacgaacggggcccgggacgagggccccggggacggcacgatgacagaaaataatttttcgttgaagaagatagaaattaatgtttcagaagcagaaaagccaactggaagaaatgccatgaacatgccggaaacatatact

SEQ ID NO: 1957 - DNA, 225 bp, Bos taurus
  Clone ID: 18-LIB3057-004-Q1-K1-E5
aacaactaattgaaaattgcatcttttcatgactgtttggtttcacgcagattgatagcagattatatgctcctcatttaacggtgttactccctcgtagcacatttcctaagcgccaaaaaagctctgtattgtagagctgtatctctagatctcaaacgggtatataatcactcaaggtcaaacatgattgcaggcatccttctcttgcgatatgtcaaaaca

SEQ ID NO: 1958 - DNA, 437 bp, Bos taurus
  Clone ID: 18-LIB3057-006-Q1-K1-E5
cggacgcgtgggtcgcgagcggccgcccttttttttttttttttttcatgggggaaaggcaacgactttatttattcgtccaggttaatctttgaaatattacaagtactggcaaggtagccagttttaagtagctttgtgactgtcctttccatctcctacatgacttgtacttcacgcacttggaaaatctacttgaagctgactacagaagtgaggaaagtgaaagcaaatcccatgaaagccaagatgagtcgggctggttttcgggtaaccgagccctcttctccttgcccctagacccccactcgaagtgggacgcactccaacgggtttccaacacgttcccggggcgcgggcaccttccacccgaacggatctcggcaagttaaccagcacgtccgcaggtggagttcggcctgtttgagaagcaaagc

SEQ ID NO: 1959 - DNA, 401 bp, Bos taurus
  Clone ID: 18-LIB3057-007-Q1-K1-E5
gtctttgtctgatacccaaacctcttcttctttttcccaagatgggagttcaacgggatgaagcgttttctgaagacaacgagcctgctgaaaatgcttgtgctagtagttccttgaaccaaggtgctcttgccagtgagtctgccaacagcgatccaagtgtaaatactgaaagtcgtgaagttaatgaaccgggtgacaattcttataagaaaagtagtacaccgcatatctatagacaagatgtcgtgaaaaataatatcagtggcatgattgggattgtgacagaagttgctggtgattctgattcggattcagatagcagcatcactgatgacgaaaatgatagtgaggatgaggatggtgatgatgaagaaagtgatgacagcaataatgctagt

SEQ ID NO: 1960 - DNA, 190 bp, Bos taurus
  Clone ID: 18-LIB3057-008-Q1-K1-E9
acacggatccggaatccccggatgcgaccatacgtaaccagcaacttcaggctcgagctcaactttttatcactatctttctctcactcacaagcggaatcattctaaaggacaaggccctgacgcatgctcgaagatcgaccaaatcaaccggatcacatcttgatacaatatccaataatgctatttt

SEQ ID NO: 1961 - DNA, 337 bp, Bos taurus
  Clone ID: 18-LIB3057-010-Q1-K1-E5
tttgcttgttatttttacaaattccacctttatcctttttaatgccatatttggagtgtggcacttttatggcttttaattttcgatttgacagatgtaagaagcatcatgaatagtttatactgtggtttttcagagactgaatgccaagagaactcggtaaatgtttattcttctcagctttctctttaaattcccctaaatagcgccccatttgggaacagagcaagagtgttgaactgaagaccaaaatgccctgaaagtgtaaaataatccgagggggaatatttgctgggcgtcacgaaagacttggatgaaatttcaaccctgatggttt

SEQ ID NO: 1962 - DNA, 416 bp, Bos taurus
  Clone ID: 18-LIB3057-011-Q1-K1-E9
gaatatttgaattgatcccttgaaagttaacgttttaaatgtgatacagttgtttctctatgctatagacttgtagtctgtctgcattagaaaaagttttaaacaacctaatttgtttgaacacagactacatgaattgtgtaaatgtataaagttgttcgcaggaatataccaatgtgtatgtttggcagaggggcaaattgttacctcctgaaatcattgtatatgccatgttttgcgataagattgcttgcagttttctgctcaacagtgtgtaccttttgtttgggaaagcactagtgatggattaatttttaaaacaatagacttagtttgcaaattatgcctttaggggaaaaaggcaaatgatagagaacaggtagtgttttgagggccaagaaagaagttttccaaaa

SEQ ID NO: 1963 - DNA, 437 bp, Bos taurus
  Clone ID: 18-LIB3057-013-Q1-K1-E5
gagagaagtgttgcactgcccaggggttttcaagtttagggctgggggtggtgaggggggctcgaaagctcggaggtgctcgggtgaatacggtcccccactttgctggaagacgctggaacgcgctcggaggtgtatcctgttctttacctgactggggactccaaatctagttctgtcattttcaacttaaacagataaacatggaggcacctccagtcaccatgatgcctgtcaccgggggcaccattaacatgatggagtacctgctgcagggaagcgttttagatcacagcttggaaagcctcatccaccgccttcgtggtttatgtgacaacatggaacccgagacttttgttgaccacgagatggtattcctccttaagggccagcaggctagtccatttgttttaagggcccgacgctctctggatagg

SEQ ID NO: 1964 - DNA, 425 bp, Bos taurus
  Clone ID: 18-LIB3057-013-Q1-K1-E9
ccgaaaacctcctcccgggatcgagcgcagcggcacccctaggccaggggcacctctggtgtggcagaaggtgattgaattactcagatatgaagatcatcttctaggttttgtgtaaaaggccccggatatttcaagtggccattttggaattacaatgtttttggataattttaccccagaagtttattaaaattggcaagaatcatctctgaagtgaattgatagtagtgaacagttctgcaagctacttaaaaagagatccaggcatttcttcagtattttggttcaaacggattatataactggtttaaagtgttttcagctggtggtatttttgccttccccccaacccctcccctcttgttgttcttcagccaaaactgtaagatatgtttgatttgtgtactgagtagtttcggcag

SEQ ID NO: 1965 - DNA, 63 bp, Bos taurus
  Clone ID: 18-LIB3057-018-Q1-K1-E5
tcccggtcgcccacctccggtaactacttactatgtggtatgctccctttcccctaaatctag

SEQ ID NO: 1966 - DNA, 416 bp, Bos taurus
  Clone ID: 18-LIB3057-022-Q1-K1-E5
ggacattctcagaggcggcggttatggtgcgcactgggtcggtggagagctgcgactggagggtgatctgctagagagtgatctctaggtgaaaatcagaaaggaaatttactataatcaagcatgatggatccatgttcagttggagtccaacttcgaaccacaaatgagtgccataaaacctattatactcgtcatacaggtttcaagactttgcaagaattgtcatcaaatgacatgcttctacttcagttgagaactggaatgacactttatgggaacaatacaatctgcttgcatcatgcaaaaatttacatcgacagatttgaagatttgcagaagtcatgttgtgacccatttaacatacacaaaaaacttaccaaacaaaattacattgtattgatttaaatgatgcc

SEQ ID NO: 1967 - DNA, 209 bp, Bos taurus
  unsure (24): Clone ID: 19-LIB3057-001-Q1-K1-E3
ccggccgcccttttattttttttntggcgaattgattaaaatattttaggggaagaaatattctgaagactatagttcattatttataggaaaaatataaagcatacatgtttaaagatcattttgtaacgacattataggaaatagatttccccaaattacataattagttttgtagcgctaccagtggaatgcattctgcagaaaca

SEQ ID NO: 1968 - DNA, 435 bp, Bos taurus
  Clone ID: 19-LIB3057-002-Q1-K1-E3
gctttgagagcggtctgcgggtgctcaagccctggagtccggagacggtggagacaacgtactatgggcaggtgctgaagaaatcagcagacttccagaccaatgcctgtgtcactgcagccaggccggtccctcagcacatccgggaagccctgcagaatgtacacgaggaagtatccttgaggtattatggctgtggtctggtcatccctgagtgtctggaaaactgctggattttggacctgggtagtggaagtggcagagattgctatgctcttagtcagctggttggtgagaagggacatgtcactggaatagacatgacagaaggtcaagtggaagtagctaacaagtacattgaatatcacatggaaaaatatgggttccaggcacccaatgtgacttttattcatggctacatagaaaagttggaag

SEQ ID NO: 1969 - DNA, 217 bp, Bos taurus
  Clone ID: 19-LIB3057-005-Q1-K1-E3
acgcgtgaaatggcgagccttcgtgacctacatctggctcttggctgcctgcaccctgatgagccacggaaaggggaggcacctgatggacgacgatcatgttctgtgaagcttatggagcgaataactacctatgcagactaactacatcatcatcactgcaggaatatctcgttgcttgtatgacagtatatggaatgagtgtaataagctggct

SEQ ID NO: 1970 - DNA, 200 bp, Bos taurus
  Clone ID: 19-LIB3057-007-Q1-K1-E3
ggaaatattccaacctaaacatttaaatactcaagtgatctatggtaccatttaatcggcagcacaacatgcgacaaacctatctctaataacatcaaactgcatatcaaaagcaaacacaaataccctccctctcctcaagacgattataagacacttatcacagaaaatctaaaccattttgacactacatgggctcc

SEQ ID NO: 1971 - DNA, 379 bp, Bos taurus
  unsure (288),(349),(368): unsure at all n locations; Clone ID: 19-LIB3057-009-Q1-K1-E3
aatcgagaacctcttcaggaaggaaagggaagaaaagtgtaacttcacttcaaagaagaggttcttctagaaggaaaatcgctagggaggaaaaattccattcaggaaatcacctgccgagtctacagatgtttcaccggtcccagtagtgccagccccatcgaagcccggatcagaagagtgggtgtatgtaaatgaaccaattcctgaggaaataccatcatttttagtaccatactggaaactgatagaaaattcctatataaattccatcaaaacagtactcangcagttgagagaagaccaacatgccgtacttgcttacttatatgatattagaacaggcttncagcagtttcttgagcgtncagaccacaag

SEQ ID NO: 1972 - DNA, 366 bp, Bos taurus
  Clone ID: 19-LIB3057-013-Q1-K1-E3
ggcctccgttatggaataactctaggttttatttgcactagcgcatatcctattgcagcagggatttcgagttgggcggtatcgtacatgatgtcgccttactcgacacaggtatcccgctccggactctcctggcgtaccgacactggctgtacaatatgaaccgactgtacatcactacggacgggtctttcttccgagttcacatactagccctaaactactatagttgcaataagccatgtccagagtttaagccaggcagcatgtatattgtgatgggccacatctaccataagagaaggcaactacctacaactctgcttcagatcctgatagggcaccttcactcaagatatgtactac

SEQ ID NO: 1973 - DNA, 311 bp, Bos taurus
  Clone ID: 19-LIB3057-014-Q1-K1-E3
atcctgacttactgcagtcacaccatcgcattttagacttcagtgctactcctggtgagcaccactcgtatagattggtttttttctctttttccccccctaatgtaatggtaatgctatatgtatctctcttgctttggcatggactcggtcagatgctaaaagtcatgattaaatttcaaacagttggaactggtttttttattattactcagactaatttagtatgcccacatgcaaatggatctctcagatgttccctttcataaaatgaagttaatatagtatcatgcaaatattatcaggtcata

SEQ ID NO: 1974 - DNA, 332 bp, Bos taurus
  Clone ID: 19-LIB3057-017-Q1-K1-E11
cgaaccttgccccttttcccacactgcaggaaagtgtcatctattgtccccatatatccgcgaaagagatgcatctgctgcttcttgcttggcttactcttggcagtcactgccactgtccttgcttttggcacatggaagcatgcacgacgatatgtacgcatctattcatccttggcatctgtcatcctgccggcagtgctatgtttcgtccggactatctctttttcctagcatcatgacaagccacctttgcctcttctcggaagttatgaaccctcttctcaccgactgtgcgctgcccctgactgataaccacagttactctttta

SEQ ID NO: 1975 - DNA, 347 bp, Bos taurus
  Clone ID: 19-LIB3057-019-Q1-K1-E3
tcgagccacgcgtcagacgtgaccgcggccaaggagttagagacttctgcaactgagctactgcctttgcaagccggaacattgccgaacagtcgatgctgccacagtcagacattaactatcagagaccaccatgctatactgtgcttgacacagtaggacccatccacggtgctgcggagctatagaaaaggagtgggctaaataaactgcaggaaccacagctgtaccagagactagactgtgcacaaagacttccgaaaccacaaagacctcatagaccaaattgggttaagatgaaatgtcgagcatgctatctgaacccactattcgtagaaaagcactga

SEQ ID NO: 1976 - DNA, 333 bp, Bos taurus
  Clone ID: 19-LIB3057-022-Q1-K1-E3
aggccctcgtgtgtctgtggcctcacatgattgattagctctggttggtgggctgaggcctcccgctaagccacgaggacctctccgccccagggggctgggcagcagagggagaaggaatgtgctgggggttctgcgtctgcccactttcttggatggtctgaaactgaacctggaagccggtctcctccaggtggtgccagagctggtcagaacccgtcctcagtgtgggcgttcctgccttaggaccgccttcgaggcttccttccaacagctgttttgcctatggggatcctgcccttgctcattgcacttgttgcctctgcttagcat

SEQ ID NO: 1977 - DNA, 143 bp, Bos taurus
  Clone ID: 19-LIB3057-024-Q1-K1-E3
ttcccagctcgacccactcgtcctcggcacattccagtcccttactaatttctccctcatgctccaaaattactcagacagttaaactaaatagctatcagtccattctcctatctcatataaataccaatcaactctcaaaa

SEQ ID NO: 1978 - DNA, 322 bp, Bos taurus
  Clone ID: 20-LIB3057-001-Q1-K1-E7
gttcttactctctcaaaaaaaattttaaaaaaaaatgggcatcgaacaatctaggagcgtggcagtgggtgaagtggtggacaggcaccaaagctattttctcatccacccagtggatgagtgggactgtgaaacaggtgatgtggaatgaatgggtgcaacagctgtacagacaatcaataacacacacagttctggaaagaacacatcacttgtgcttgtttgatgagcttgtcacattctaatccctctccccatcctgtttcaattttgggaaacttgtatctgctggtgtcagcaattctgattctgaaaatagatc

SEQ ID NO: 1979 - DNA, 333 bp, Bos taurus
  Clone ID: 20-LIB3057-003-Q1-K1-E7
aaacaattgacatgaatcttgaagaaaggcagatttccaagcaaatacataggttcattaacgtagcctaagaaaacatttgcataagaaaaacacattggtgagctcaaggtttgagataaagttcagttcaggcagaaccaggtgttgccacgacaacacacgattagaagagaaaagagaaaaaaaacatcggcacttgaagtttatttcctcctgctgcttggggacctctagccttcctacccaggctgttaaccctctcaagatgagggcagagtgtgggggtcaccaggcagcgcaccaccccctgccttgccacctatgggggct

SEQ ID NO: 1980 - DNA, 426 bp, Bos taurus
  Clone ID: 20-LIB3057-006-Q1-K1-E7
catctgaaggcaaaattttccagatacggcagacggctcccagagtacaataagcagggaatgagaactatttacatggaaatttcttcctcaggatgcagcgaagaaaccgcggccgcttgattctaccagatgttcctggggttactgtaacggagaaggagagacagagctaaacaagcttcaagatttaaaagtgcctgtgtgaagtcacttttgctggaaaccacactccgggagctttttgttcagatcttgtttttctgtcaaatatacattaccctgaccttacgagtggatgaagatacctcaactgtctgactttgccaattgcttgatttcagaattttaaacggtggaaggagaaagaaatcctcctaagatctgaacatctcagtggctttttttccagcgtcgtcaatagct

SEQ ID NO: 1981 - DNA, 407 bp, Bos taurus
  Clone ID: 20-LIB3057-008-Q1-K1-E7
attgccccaggcactctggggcactcaaagcgcaggcgcagcgggttgggcggcagcagcatcaagtaaccggccgttttggcagcagcaccgcaacaggtgtagacaggttccgcctgactccaccctggaaagtccttttgaggaaatggccctggtgaggggcggctggctgtggagacagagctccatcctccgccgctggaagcggaactggtttgccttgtggctggatgggaccctgggctactaccacgatgagactgcccaggatgaggaggaccacgtatgtccgcagctactatggaccgccctacgtggggcctggagtgacgcacgtagtggtgcgggaggatccctgctacagcgcgggcgcccccctggccatgggcatgcttgcgggagcc

SEQ ID NO: 1982 - DNA, 252 bp, Bos taurus
  Clone ID: 20-LIB3057-010-Q1-K1-E7
atacaagaagcccaggcacaaccctatggccttaacatggccacgatcgaccgcctaacatacaacagcgactaactcatcaacccgcatctgatgctaacctacttggcatcgatactagcccgaatttacacacacctaccctggactaggatgagcatcacccatttcagtaacatgctaaaaccactcgtcttgacatttcccagacttcactccatgaggtaacggagttaaacgtacagaacgggc

SEQ ID NO: 1983 - DNA, 372 bp, Bos taurus
  Clone ID: 20-LIB3057-012-Q1-K1-E11
gacatcctgtgccccgactgcgggaaggacatctgagcgactccccactactctgacgcccccacctacccaggtccctgctcgagctgcacgcagacgctgtttgcttcctccgcctgccaccgggcaatgctgcaacccggtcccctggccactgcgggactttcctctgcgcttctcagcgatactcacctgtttaagtcctttaatccacactctgtgcatgggaaggagaaaactcatgggaaccttaggcgggaaagggttttgactctgtaatcaagcgagaccaatccgagtgtaaaaatcattttgagtgatatctttataaacatttctttcacgcgtaaaaattaatacaaaatataaaaa

SEQ ID NO: 1984 - DNA, 267 bp, Bos taurus
  Clone ID: 20-LIB3057-012-Q1-K1-E7
tccaagtcttggaaacaaattgagcttgattcctgaacctaattcaactgtaatgtaacctctttcttcttttccaaatacaagtaatattttattagttaatattacagtaataaggggggaaagtttagatgtgtaatttattaaaggaaaagtggaattgtttgtcttagtgcaactcctgagatatttttaagtctcttaaaaaatttgtataattacatgtaatattttttaaataaaaagaatcttttgggacctaccttt

SEQ ID NO: 1985 - DNA, 330 bp, Bos taurus
  Clone ID: 20-LIB3057-021-Q1-K1-E7
ctttaactgatttatacccagaaaaaccttcattatccagcaacatgctcccccaagaactaagtgagtgacagctgcctgctgccatctagacttgcagttgaaacaagcagagatggtgttctctgtgtgttctgtattcctgattgtccaaagactgggaagtcaaaggtcttaacaagtctgtattatttctccacatacatccccttccttctctgcagtacagcatatcagtgcaccccacatgaaggttctaagaaatgaacccaaggtagataatttataatgtttgtcagttactagaaatgtgatggtgcatagaagaaa

SEQ ID NO: 1986 - DNA, 420 bp, Bos taurus
  Clone ID: 20-LIB3057-025-Q1-K1-E7
gggccggaaagcctgaggggccgaggcctggcactgggtgggggcatctgctgccaagaggagagagtcaggcgccagcccaggcctcagctcaggctaggccctccttagggacctgcttctagaactcaagtgggagctgctacctccctttccccagtctgaagattgggactcctggtttgtccctgaaacactgagccccaactccctcccctatcttcctcccacagcaattcaaggtgccaaaaagagtggaggaactggctccaacgtcatctcctctgggccacaaagcctgatatgacctgaagaccccatattgtaaaggatgtgccacatttccaatgaagacccagggtgttcagattttagtttctaaatcccattatctgttgaaaggaagcaaggctccttgga

SEQ ID NO: 1987 - DNA, 398 bp, Bos taurus
  Clone ID: 21-LIB3057-002-Q1-K1-F1
gcatcagtgtcaagtgtacaatctataccatgaacggttggagatgactcactatctcgagacgaatgactcattcaacgcagatatatctatgtcctatatacgactcatggatatatactattgctctacatctatatgtactatataactgtacgaagcactatgtcagctatcaccactgctgactgtcaagccgtatagtgcgacagacctatgcacgcgacctacctacttcaagttcatcctgtccagagacacatttgaacagactacttgagatgaacaatgacctgacagaaagcctgacatgagatgctgatggtagaaccgctcatgacaggagaatgctgcagcactacctcgagcacctgtcacaaaccatgccgatgctgata

SEQ ID NO: 1988 - DNA, 397 bp, Bos taurus
  unsure (384): Clone ID: 21-LIB3057-007-Q1-K1-F1
taatagtgatcctacaacccataaagcctgaaatgttaattatccggcgctttatagaaaagtatgttaacccctgttgtaagaaaaagagtgtgccttgatacatagagtgtttctcttttgtcttctctgttttcatttaagagtctggtattagaagactatttagaagagctttaacaatatgacgttaaagtgaaattttacaaattgaaaagccatatattatttgttctaaacagttacatgagaaggtattttgtcactaaagtaatctaattagagatgttatctttattaagcatcttttataagcattattaagaagaagatggatttttgcagatgattctaactacttgtctaataacagtaggcatcagncacactcccagga

SEQ ID NO: 1989 - DNA, 311 bp, Bos taurus
  Clone ID: 21-LIB3057-008-Q1-K1-F1
agtagagtaattccttaggaaggttaattatcattctgggttgtcttattaaccctatcactgaatccacaaggatatgcatatcttcatccctacaaagaattccaattgcacatactcaagatattttcatataaaaatttacacatatcaatattaattatcctttatatcattacgcctatactgaattcaaagaaaataacctctacatttctcactaaattacaattcaacattattaatacctcatatctcctcaattattatatatcaatattcataattccttttattattaaactctattc

SEQ ID NO: 1990 - DNA, 191 bp, Bos taurus
  Clone ID: 21-LIB3057-013-Q1-K1-F1
tggtttagcaccaggcgccccacgaacttgctgttccttaccggccaaggggccgcccgctgttccgtcaagccccgtgttcccggaccaaaggcttttccgaaccgaaccccgtccccaacccccgccggggcccccccggcccgtcccccggggaccccggccaacggcccgccgccgggaccgccggg

SEQ ID NO: 1991 - DNA, 425 bp, Bos taurus
  Clone ID: 21-LIB3057-014-Q1-K1-F1
gctttacattcagtttaactggttaagtgaaacagtttttatggtgcaaagataatttgcccactttgtcatcataatttgactctcctgacctatagtttctaaagagttttttactactgtaacatcatgtatctgatctctgtcacaatggacaagtatacaggaaatatccaactttcatatgtttgcttcaaaaaggttacaggttgaataggtcagctctatgtttttgtttcttaaccagcatcaacctatatagcttggtgtaaacttgccaggtattcagagaatagtgctggttaaaatttaaatatgatagtcaggaagaaaatatgatctctattgactgatgtcctttcaaactaggactagtgaaaacatttttttcagagctgaagaagaattgcacatttaagatcata

SEQ ID NO: 1992 - DNA, 236 bp, Bos taurus
  Clone ID: 21-LIB3057-018-Q1-K1-F9
tcccggtcgcccacgcgtccggtttcagaaatcggagcaaataggtccttaagcaggctcactgcttttaatatttattcgttggcgtactctctttgcctcccctccatctgtgtggtgctaccgcagctccgctctgcacactatgctaggaagcatcccttttgacatactatttttggcaacagagtcatatatgcccattcattcagaactgtctgcgcacctttcctgat

SEQ ID NO: 1993 - DNA, 374 bp, Bos taurus
  Clone ID: 21-LIB3057-021-Q1-K1-F1
gctttataccagaaaaaagccaaactatgaattgctggaaaaagaagtagagaaaagaaaagttgccttacaagaagccaaattaaaagcaaagggattgaatcctgatggaactccagccctttcaactcttggtggattttctacagcctctaaaccatcatcaccaagagaagtaaacactgaagagaagtcacctatttctgttaatgtgaagacaatcatataagaacccgacgatagacaacaggcttctaaaagcccttacaatggtgtcagaaacgacagcatgagaagtagaaatagcagaactgcaagtcgatcaaggtcaagaacacgatcacgttctagatcacatactccacgaagacatt

SEQ ID NO: 1994 - DNA, 317 bp, Bos taurus
  Clone ID: 21-LIB3057-022-Q1-K1-F9
cgacccacgcgtccggttggtccagcatatacgctctgcccattttggctcgttccttcattatctaccagctgtcaacgttaaaccctcttaactaatatgtagaacttctgtgaccaatgattgaaccaacatcctctgcaatttaagtgcatagtcttaaccactgtaccatcatgaacttccagggtctactgtcaatcaagaaccagatttgcactgatagaaagattaatatgacaaggttcctacactaaagagcctgcaaactatcataagatattaacaatccacatgtacatcatgataaactcttt

SEQ ID NO: 1995 - DNA, 396 bp, Bos taurus
  Clone ID: 21-LIB3057-024-Q1-K1-F1
gggaaatggccacgggaacagaccaagttgtggtcctcggcctcgtcgcccttagccggatcgtcttcacttattacaccgcctgggtaattctcttgccattcatcgacagtcagcatgtcatccacaagtatttcctgccccgagcctatgccattgctatcccactggccgccggcctcctgctgctcctgtttgtgggtatattcatcacctacgtgatgctgaagaaccagaacgataccaaaaagactcagtgaaagcccagcaagaatgaggctgctggccccgtctctgcttcttctccagggcagacccaacaagggtgcccacaggacccattcaggcactgatgccccgtcaagcctgattgccctgcagacacccctgtgggat

SEQ ID NO: 1996 - DNA, 409 bp, Bos taurus
  Clone ID: 21-LIB3057-024-Q1-K1-F9
accgtgctgctagcctgacacaagcgtacgacacttatactatatccaggatacatttgcggtcggactctttaaatgtgtctgcctgcttctcatgcatatgctgatcttcaaactcagaattctcatatatacctgatatggctcatctttgctttaatgtacatcagcagaaccaagcacaagcaccacatggaggaatagacaactccctgactagctcatgcatctctgaaactatcattgttctgatactatctaatgcctgactgctgataatactcttaaagatctttatcatcttactactactaatcctttcaatggctaatcacctgcatttagcacttatgaatgaaacactcagctagaactttataatctggaaaagtttctattataatcttaa

SEQ ID NO: 1997 - DNA, 306 bp, Bos taurus
  Clone ID: 22-LIB3057-001-Q1-K1-F5
gtcggagggaagctccagagcacattctaggtcctggaagcgagcgcgatagtgggtcagcatggaagctgagtccactcaactagaagagaggcgaagacaaggtcatcatggctacagtgtccacacatgaataccaataaaaaggtccccatttgccaccaccaagcaagcatagtctgttgttttgtccaaaatcaaaactgcacatccacagatcagagatgtcaaagattatcctggaatgtcaagaagaaagtctctggatgagagctctgcctctctctctcgtgagcatgcttgtca

SEQ ID NO: 1998 - DNA, 296 bp, Bos taurus
  Clone ID: 22-LIB3057-001-Q1-K1-F9
accgtccgattccgtcgaccacgcgtcggggaaaatctactaacctaacctatttttaggacctaaagctcgataccctgatttggggaaaggaccaagaatgttagatgtcttgatgtttggattgaaaggatcgtgccttggtccacacgtttttatctgattggtacctgctttttacccagaaatcacccctgtgttggttcctttggtaactaatttatttattggcctttaaaatgaaattattggctaaattcatagcagtgccttatctttgcttttgagtcaactat

SEQ ID NO: 1999 - DNA, 295 bp, Bos taurus
  Clone ID: 22-LIB3057-003-Q1-K1-F9
gcgagcggccgcccttcttattttttttttcttattattttttatactttatcaatgtctctttttaaatcacattatacaatttcttaaataaacactatatacatacaacacctatacactatatcacaaacaaattcaaccaccatatacacaccaatgccccaaactatacatcactgatagcattgcatgtaacacaaataccaaaaactagatcatacaatgacctcctataaaaactcacatcccatctcaacgcttatccatatcaccattatcataaactccaaca

SEQ ID NO: 2000 - DNA, 232 bp, Bos taurus
  Clone ID: 22-LIB3057-008-Q1-K1-F9
ccgatgcgacccacgcgtacgcgtccgactctctggctcgagctctagctttttcggttcgagtacactactatctatgggggtcttattaaatggtcggcagttccaatcatcgatggatcaccgccttagggaagcgagtcgacaaccggatctggactacgaacgcacgctactgtcagtccatggaggggagcatacagtagcgactgaatgtacgacatgaaccttg

SEQ ID NO: 2001 - DNA, 400 bp, Bos taurus
  Clone ID: 22-LIB3057-020-Q1-K1-F5
aaccatagaacactcagattctggttaggacttccattaactcctgtccctcttagctaaaggtaaaacttcgggtatagcgtcaacttttggcctatatctggtcctttgtggaatggccattgttataaggtatggtcacaggactgtaactcaatgtcatattatacttataaactgggaatcaaaagaatccatacaaatatcatgttaaacattctaaaatgtttgtttacaaattgcatattttatgtacaaaaaccaaccatatcaataccaaatgtacatatcaatactaattatgatataaactgcttttatccccaccttttatggacactttacccactcttaatgtctattcttatacatttgtactttcttttaaaaatcaatccta

SEQ ID NO: 2002 - DNA, 446 bp, Bos taurus
  Clone ID: 22-LIB3057-021-Q1-K1-F5
cccacgcgtccgcggacgcgtgggttcatgtggacagggtaaattttcacatagaatattcctcctgtgcaactctaggtccaaaaggagctttgaagctgactcatttctatgggaacataactcaggagagaagcttccaaaaaatagaccaaaaaaaggagagattctagttgggaacatgtcagatgtcaccagccacactttcgcacttaaataaaagagctaagccccaagatcccatgatgattttagttttattttgttcttggctatttcctctttctaaaaatagccctctctggggattagtgggatcacacagtaagtgttagtgacatttaacctttattaacatccatttttaagtatccacattttcaagcacctggcattacacagtctggcaaatcttccgttctggccaacactgggatttaaatcaa

SEQ ID NO: 2003 - DNA, 223 bp, Bos taurus
  Clone ID: 22-LIB3057-023-Q1-K1-F5
tgccatatgcaaccatgtcttgagggatatgaatgtaaagttcttccagatcggaaagggtggagctgttcctctgggaataaagtgaaaacaactatggttacccattaaccaaggtgaaatcaagtgatcctcaaggctgattacattgaacatattcatacttacataattcataggtgatctagaaggaaaaattttatacatcttcgaagtgtcactc

SEQ ID NO: 2004 - DNA, 431 bp, Bos taurus
  Clone ID: 22-LIB3057-025-Q1-K1-F5
gcagtgtgatcagcaagtctacgctgaggatgcccatcttctctgcctcccggcttgagagcagcatgtactaccattcattggctccctctggttggaaaagcaagcatctgagttataaggcttcctttggtctactttttgactcttaagttgaaattaagagaatgaagttggataacctaaaagtaaacccagagatttcaaggatggaagctaccactactctttgttgtctgaagacgccaaagggcattcaagaatctatggaattcatgctgtggattttcaagcagtctcagcttcataaaattttattccttctaactcaagtgatttgctgaagtaaattttaaatggagagtaaattttactttcataaaaaaaaaaaacttgtctcatcaatatattataaatccaacaatgtctgg

SEQ ID NO: 2005 - DNA, 253 bp, Bos taurus
  Clone ID: 23-LIB3057-001-Q1-K1-F3
ccgggtcggaccaagccttcctattaaattaaaaaacttcggccggttattgctgccaggcccctaattgtgtaaatgtaggtattttgtaaaaaataaccttgaaattgtaaattgacatgtgtttggtcagattgtgtcaggtttgtttccttactttttttttttttttaatttgaaaactacattagcaataattaattcagtgattaccacattctgccattaaaggatatattatcaccattatact

SEQ ID NO: 2006 - DNA, 172 bp, Bos taurus
  Clone ID: 23-LIB3057-002-Q1-K1-F3
gtggggtcacaaggaatcagacatgacttaacacatggcacaacacaaagcgtggataggtgagattataaatcatttatattatacatatttataaatatgtgaaatcatcacagataaaattacaggtggtacaaaggaaaggtatgtgtttcaaagtcagcacatatta

SEQ ID NO: 2007 - DNA, 370 bp, Bos taurus
  Clone ID: 23-LIB3057-003-Q1-K1-F3
acgggatgaggtgcatctcagccttgcccaggactttcctgctgctggggccctgaactaagccagctcagccttccaaactgcttagtgactgctgaagtgggcaaggggctcttgctttgcaaggatttgggcagaatggaagtcttttgtccagatctggaatcaaaggttttggagcctagcacagagctcctggccagcatctgaagcctggcctaccactttgacctttgctggcaccctattccgagcttaaaacatcttgctaggaatgaagggggcctggctgggggcccagagctaagtaacccacccggggaaagccctggttaccaatcttaaggccttcccacgttaacaacattta

SEQ ID NO: 2008 - DNA, 222 bp, Bos taurus
  Clone ID: 23-LIB3057-004-Q1-K1-F11
cctagctgacctagttaaaaattcaaacactgttatcaaggatagttacagtcctcttagtaaggactctattacttaaaagctgctagtgatctttatgtaaacgtatatattaccctagaaatatcctttactccttgcatttctatatagtgaatattcaggaatacagatgtactgttgcccagtcatacagcagcacattcacttgcacttgatttc

SEQ ID NO: 2009 - DNA, 325 bp, Bos taurus
  Clone ID: 23-LIB3057-005-Q1-K1-F3
tttaaagtttacacgaagcccaaactggagcttcagtctggtctgtgtatggaaaatacggcttaacccatggtccctaacaaaatagaaatcagagtattgaacaccttccaagaagtaaatgctgtggaacatgctgccctagaaactttgcctcaagatgttttcactgatgaacttaaaccaggtgagggacttgatcatctggacacccttgatgggaaatcaaacagtctagatgattcaactgaagaagttcagtctatggatatgacgttgccgtttgaagaagccgggaagctgcttgtatgtcaatcttgagctg

SEQ ID NO: 2010 - DNA, 425 bp, Bos taurus
  Clone ID: 23-LIB3057-008-Q1-K1-F3
cgcccgcttgagaggagcgaggccggctcttgtgcacgacatggcgagtgctcgtctacggaagtcaccggacctcgattagcaagggtgccatgacaaccaggactgacggtactcactatcaagagcgacaaaattgccctgaaagatgcccggcaatgcattgatccctatctcacacttcgtgcaaaagatctcaatggcataaatttaactcctgtgcacgatactcctgtggcttcaagaaaagaagatacgtatgttcattttaatgtggacattgagctccacaagcatgttgaaaagttaaccaaaggtgcagctattttttttgaattcaaacactacaagcctaaaaaaaggtttaccagcaccaagtgttttgctttcatggagatggatgaaattaaacctgggccaattgt

SEQ ID NO: 2011 - DNA, 396 bp, Bos taurus
  Clone ID: 23-LIB3057-014-Q1-K1-F11
cgttttaatcctccaaccttatatctattttaccacgtctaaaagttttgaaagatccgtctcagtgtcacgttagctctatttgagtttccattacaatgaaacagcccaactaccctgacatattaggacatctatcagataaaagcttatatgagctacagaagtttaatgatagtttagtattatgcttagaaggacttaatcactgcatcagaaccttataaaagctaccttgagaaaaagcatttatggaatactgttcagagttatctatttttaaaagatgatatgtataagatgtagaagtgaggaagaaaaattgaaagaattgtcctttcagttcatcatatcatatcagatcagatcagtcgctcattcgtgtccaactctttg

SEQ ID NO: 2012 - DNA, 336 bp, Bos taurus
  unsure (270): Clone ID: 23-LIB3057-014-Q1-K1-F3
gggcaggagaaaagtccggccagacttgagtgctggctccagtcagggggcctgggcgagaaggcagagtgaggccaggtggcaccagccaggaatatgatgataactgaaaagacgaggttcaccctcgccgtggaccctccttacccctggggaggcagcagctggctctgtgctggaagcagaccctgctgagtggattccagggctttatttgtctgtttattgcaggccttcatgtctgctgggactgtactgtggagtcagcangggcgccgggcccggaagggtgaggcgcccttccgctcttggcccactgccattcccttccagctg

SEQ ID NO: 2013 - DNA, 197 bp, Bos taurus
  Clone ID: 23-LIB3057-024-Q1-K1-F3
caccaccgactaacttaatttccctggcaacttccacctaaccctgatagtcttcacttatcattcagccattctaacccactacatacacaaccacacctaacatatcatcaacaaatattatcaaccccaagcctcatccatatctatcataatcacctccctcaacatcttccatcccttctcccttacaacca

SEQ ID NO: 2014 - DNA, 196 bp, Bos taurus
  Clone ID: 24-LIB3057-001-Q1-K1-F11
cgaacgcatccgtacaaaaggattatcaccaaactccccatcaacctacagggcgtgactggcgagggggctgatgactttaacgcagcgcccggtgtcccaacacgaacggctctttaaaccagacccagatcacaacacgcggcgttatcgcgatgtgctcatcgccggtcgacacgatcgacggtccgacgga

SEQ ID NO: 2015 - DNA, 318 bp, Bos taurus
  Clone ID: 24-LIB3057-001-Q1-K1-F7
tgaacggctcaggttttggaccaatttacagtaggaatcaattctgacattcctgaaatactacgaaattgacgcaatcagatcatgcccagcgcgtctcaaatttgatttccaatttgaacacaaatataccaacaggtgttgaaaatgagttaaatttaaaatgatttttcatgatctcttctgtgaggactagagttgagacttactaagggtgtcaagtagatgtgaattaaagaacgtcactttgaaaatcctttcgtcacagtatcgcactaggcacggaacacccaagccgagatcgaacgtgttctaaat

SEQ ID NO: 2016 - DNA, 106 bp, Bos taurus
  Clone ID: 24-LIB3057-005-Q1-K1-F7
cagctacttagaggtttcagtgacaagaactgagaatttttcagtgaagtacctaaggagcattgccttttcatcagattttaaagataataaatacattaactat

SEQ ID NO: 2017 - DNA, 422 bp, Bos taurus
  Clone ID: 24-LIB3057-009-Q1-K1-F11
cttgtggggtgtttgttgcatgaagttacagggaatacatagattcttggatgggtggatccatccatctgcacccaggtgctggggacccagaggtaaattagacttgatccctgccactgctggtctgatgcaggtagaggatcccaggtcggttgacagaccatccccacgcagcctggtgtacttgccagctgtcctggaagcagcagccagaggcagccctggaccctgacacctgcagtcacctgtctcaaaggagtgcgcttgggacgaagcacagcccacagccctgacgaggctcacaggcctccctggggacagaaccactgcagggtgctgtgggttcgtcgtgtctcaatgttgcttcgtctgcctcagtggcccctcgtgcattgtccacctccgcccaagagtctgga

SEQ ID NO: 2018 - DNA, 178 bp, Bos taurus
  Clone ID: 24-LIB3057-012-Q1-K1-F11
tcgcccatcccctcacccctcactcgctttcacatatgcccttctctcgcctctcctccgtagatactaaatacgttgatacaagttcttatcttcagtctaacatattccactcgctcatcattgtcacaagcatcattatccattatcatcaactatctcattacatactaataca

SEQ ID NO: 2019 - DNA, 198 bp, Bos taurus
  Clone ID: 24-LIB3057-016-Q1-K1-F11
gttctagatcgcgagcggccgccctttttttttttttttttttttttttttttgttttgtttttttttttgtttggtttttttttttttttaaattttaaaatttactttaattggcttttttccggtattaccaatccatccctggtctctaagattctcctcctcccctaaacttgggggtttccacactttttac

SEQ ID NO: 2020 - DNA, 178 bp, Bos taurus
  Clone ID: 24-LIB3057-018-Q1-K1-F7
gagatttgaaggctggcctggaatttgaaggctatgcttggttacttcccggccagcatcgtctgctctgagggcacgtggggcagagtaggtgtgtcagggagtgtggtaggggacagggtaccaccgggcttagacccggggccaccactgtctcttctaggggccccggagtgcg

SEQ ID NO: 2021 - DNA, 425 bp, Bos taurus
  Clone ID: 24-LIB3057-020-Q1-K1-F11
atctgatgcccctgtatcccgtgatacctgctcagagtggctgctttcacagccctggacgacacatcgggggcctgaacttcccctcggtctgttaccagctcacttcacttctccttgcttccctgactataaactggaccagaagatctccaatgccctgccgcactgtgaagccatgatatggacaagccaatgcgaggggtatcctcccaagcctctttcaccttcctccctctctggttaccgaacttggtgtttggcggttgtttgaattttttttttttccttcttgcaattgtgtgcgtgcgtgcgtgagaagaaaaacagactgtccaggtggaaatggtgaagaggggagaagagttcatttccagggtcaacaacttatcaagaacttagcagccattttcctaaagtgactc

SEQ ID NO: 2022 - DNA, 421 bp, Bos taurus
  unsure (414): Clone ID: 24-LIB3057-025-Q1-K1-F7
gcagtttaccaaaggtttctcttttcaccttcactgacaccctgcaaagtagttgtaggatcatcatctttttgcggaaactggctcagttaagcagttcatccaagttagccaagtattaagggactaaataaagattcaaagggaggttggtgtgaccagagcctgttccttggtcaggatattctgtgcaatgactgtgttcagtgggagatcttgggtgcctgctctgggtcccttggaagtgcaccccccatgcttatccagcccagtctctttcacacattagaccccagatatgtgtttatggaaggattgaattttattcagtccacaatagctgtgtggacagctattgttttaaccagttgtggcattttaaagtcatcttaccttattttctattgactttangacagtg

SEQ ID NO: 2023 - DNA, 433 bp, Bos taurus
  Clone ID: 25-LIB3057-006-Q1-K1-G9
accgtctactgttcgacgacatagatcgtcttctcctgtgcgacgacgtagatcgcctggtcctgtgcgacgacgtagatcgccttctcctgtgcgacgacgtagatcgccttctcctgtgcgacgacgtagatcgccttctcctgtgcgacgacgtagatcaccttctccagtgcgtcggcgtagatcaccttctccagtgcgccgacgtagatcaccttcccctgggcgccgacatagatcaccttcccctgggcgtcgacacagatcaccttctcctgagcgctgtcatagatcaccatcacctcttggacaacggaggtcactctcacctagacgacgaagatcacttgttactcggcataggtcaccttcaccagtacgccgaataccggcaaccaatgtgcagaatagatcagactcccccatgcaa

SEQ ID NO: 2024 - DNA, 436 bp, Bos taurus
  unsure (404),(417): unsure at all n locations; Clone ID: 25-LIB3057-010-Q1-K1-G1
cggacgcgtgggtgcaaatcagaacactgggaacatttgcattttgagacccctgcctatagaggaaaaaaaaagtcaaaattgttctttcaaaggaaaataccaaagtattattgagaatgatcccctccagtaggtagaagggggagttttgcttttggtttcctttggctccaactccgattctctaagtcctgaattctgcccagtgggtgggttttctttgtctgcatctccaacttcaagagcacgaagcccggccctggacatgcctgacctcatggggacaatccaggagagccaggtctgcaggtgccgctgatgcagaatgcagagtcagaaagaaagcagagagggaccaaacccaggaggagctgacttggccacagcgcagacctcagccnccattggcacctncagctggactcccactctg

SEQ ID NO: 2025 - DNA, 159 bp, Bos taurus
  Clone ID: 25-LIB3057-010-Q1-K1-G9
gacccacgcatccaagcggacgctcctgattctatgacacattttcccatttgtgttcctgtttgactttaaagggagctgggtcttttttatatgcggagctgtcttacattgtgctctgtacatattgtgaacaaaccacttatagtaattttattt

SEQ ID NO: 2026 - DNA, 346 bp, Bos taurus
  Clone ID: 25-LIB3057-019-Q1-K1-G1
gctgctctgacggcccaggaaccatgagtcctgcagctccggttccgcctgactccacgctggaaagtccttttgaggaaatggccctggtgaggggcggctggctgtggagacagagctccatcctccgccgctggaagcggaactggtttgccttgtggctggatgggaccctgggctactaccacgatgagactgcccaggatgaggaggaccgcgtgctcatccatttcaacgtccgcgacataaagatcggccaagagtgccacgatgtgcagcccccagaaggccggagccgagatggcctgctgactgtgaacctgcgggagggctcccgcctgcacct

SEQ ID NO: 2027 - DNA, 283 bp, Bos taurus
  Clone ID: 26-LIB3057-001-Q1-K1-G5
ctaggagctggcttctcaggtctgtgttacagatcactgcttggactcggcgtggggtagggaaggtaactaccctgcctgtatgcctttatcttcccaccggccctctggaccttgtcctctgggtggctgcgtggtccactgcagggtagagtctgttctcccccgttctacaggcaggtgtcatcgtgggaaacagaagagaaggtggtaggccagtgcctgagttcctcttcacctagcactcacctacgttccgcgtcttggctcttttttgtttgcc

SEQ ID NO: 2028 - DNA, 156 bp, Bos taurus
  Clone ID: 26-LIB3057-002-Q1-K1-G5
tgccttcataatattctacaaatattaccaactttggagtttaaaaaaagtgttcgctggtttactttcagcaaaggatcacatgagtgtatatgtgtatataaatgtgaatacagtataattatactttattagagcatattactttaataatgt

SEQ ID NO: 2029 - DNA, 440 bp, Bos taurus
  unsure (366),(404): unsure at all n locations; Clone ID: 26-LIB3057-004-Q1-K1-G5
cggggacctgccggagcccgagcgctcgccgcggccggctgctggctctgggggaccgttgctttttgacgatctcccgccagccagcagtggcgattcaggttctcttgacacttcgttatccgaggaggtaaagaatgaagggaaaggagcaaagagaaaagcctctgatgaagagaagaatgggagtgaagagcttgtggaaaagaaagtttgtaaagcctcttcggtgatcttcagcctgaaaggctacgtggctgagcggaagggcgagcgggaagagatgcaggatgcccacgtcatcctgaacgacatcaccgcggagtgccagcccccgtccgctctcgtcacccgggtttcatactntgcttgttttgatggacatggaggaattcgagcctcanaattcgccgcacagaatttgcatcagaacttaatca

SEQ ID NO: 2030 - DNA, 423 bp, Bos taurus
  Clone ID: 26-LIB3057-007-Q1-K1-G5
ggtacgattacatatcatcctataaaggatgatcatagtctattatgataaccaagtgcatgtctatcacaaatataggcacttacgccgattaaaagaaagaaacttgacttgtcatcatctaatctctagctattagaacaatgttactactatccattgatgaagactcggtgtcggactttagagactgatgatactatataagaacattaaaatacacagctagatttgaattatgtaagtgtataaaagatgatgtgccttcattattatgaaatataatgactacaagttccactttatcccaaatgtactttgtatacttatagattctaagattacatcataaaattctagattttcataatattaggatagccaagtaaaatataaagtttcattaaaattataggtttagtt

SEQ ID NO: 2031 - DNA, 241 bp, Bos taurus
  Clone ID: 26-LIB3057-008-Q1-K1-G5
gcccttggcagtgccgctcccgaatgtctctgtattcaggcgttcgcctgcgacagccgggcccgtttagacgacgtgttggcggcttgatcaggactcgtagtaggcacagaggtcgcgattcgtactgatcgcatgctcagcgtgctatttctgttcttggtatagaatgcccagcttaacattaccaactttctacctgtggtcacaataccttatggcaccatcatgtcttggattt

SEQ ID NO: 2032 - DNA, 418 bp, Bos taurus
  Clone ID: 26-LIB3057-009-Q1-K1-G5
gcgaccccgccctgcctgggccctgagggctggtccctcttcctccagcgctactaccaagtggtccacgagggggcagaactcaggtacctcgacactcaggtccagcgctgtgaggacatcctgcagcagctgcgggctgtggtaccccagatggacatggaaggagatcgcaacatctggatcgtgaagccgggagccaagtcccgtggacgaggtatcatgtgcatggaccacctggaggaaatgctgaagctggtggactgcaaccccatgatgatgaaggacggcaagtgggtggtgcagaagtatatcgagcggcccttgctcatctttggcaccaaatttgatctgaggcagtggttcctggtgactgactggaacccacttactgtgtggttctaccgtgacagctaca

SEQ ID NO: 2033 - DNA, 335 bp, Bos taurus
  Clone ID: 26-LIB3057-010-Q1-K1-G5
acgattcttcatttaattttgttcactatatatcactcgtagcaccatcaactacagtacgggccctgctctggcccaaggaatcaagtttcagctttcagagctttataccgacattttaagtctaataagcatctttacaacgtttaatgctgaggaatacttttagaatgattatgctcctagaataaatgtataatttctgaattctggccagtctaatgccttatttgtgtctaggtctacatctttagactcaccaagtccagcccttgacattcctgacctcatggggacaatttaagagagcgcaggtttgtatgttcctgttattc

SEQ ID NO: 2034 - DNA, 341 bp, Bos taurus
  Clone ID: 26-LIB3057-012-Q1-K1-G5
tcgattgtccctgctgcccctcagattaacgtataaagccaaggaaataccggaccctccccacagggtcactttaagctctggggagaaggagaaagcgagaggagcgtgttcttctctgtgccccaccccctgctactgtcacccagttgcctttaaaccaaattcttatcagcccatctccaggaatgggaggttggctatatcctttgttgggggaaggggattggtcttattttccaagttgtcctttctactgattttgagacctttcctcagttctgggggtgggggttataagtcacattccttactcttcaaaaatctggccctgtctgtct

SEQ ID NO: 2035 - DNA, 444 bp, Bos taurus
  Clone ID: 26-LIB3057-014-Q1-K1-G5
cgacccacgcgtccgcgaagagagacaaaaaattttttgcctgggcttcaaattacttctattcaaccctttggggagagggccttcacacaatttttaatctacccgtcaagcccaagccccatgtctaaccgtactttacaataagaaagaaagcaagcaaagtaggcaggttgctaagcagcaagtagcaagcctagaaaccaatgatcctattttaggctttcaagcaacaaatgagagattatttgtcctcactaccaaaaacctctttttaataaaggtaaatacagaaaattaattactccaacatgttggcttctctgtactgccaaagtattcaatggtagctggaaagctgaacagttttgctataatccggtaaggtttactggggtaaataaaattaccttggttgatttttttaaaggatattgaaatata

SEQ ID NO: 2036 - DNA, 216 bp, Bos taurus
  Clone ID: 26-LIB3057-016-Q1-K1-G9
aaaacagccagtaatttctgtgcaaccttattatgtgcaatatttttaaatccgaagagatgtgtgcttttgttttcagatggacttatttctttagttctgcacttgttccatgttgtactccatatgagtactaatcctatggatacatattaaaactagtaaatatctcatacagctttgtgagtgagagaaatataatatttacaatatgac

SEQ ID NO: 2037 - DNA, 263 bp, Bos taurus
  Clone ID: 26-LIB3057-017-Q1-K1-G5
gtagatggcccctccgacaagaatgaggagtgatgctcccccgccgcctgctgccgtctgccgctgcagggcccaggctcgctcggtaccgccactctctcctttgcgcttctgtttcctcatgctgcttgctgttccacgcgctgcctgcattccttaggggacccgggtccctccccccccagaatgagccaggctgcagcggggcttgcttctcactgggctaagcccctcgatgttgcgtgctgatattctgggcttct

SEQ ID NO: 2038 - DNA, 355 bp, Bos taurus
  Clone ID: 26-LIB3057-019-Q1-K1-G5
gccgctcagcgctgttcgttcgcgcgcgtttgtccaccgcgtccccgagcgcctccggagccggctctgctcaggcgccaaggacgcgcgcggagccagcccgcctgccctgcccagccgcccagaccgaagcggtcccgagggagcacctgtggtgccatgatgctgcctctgagcaccatcgagggccaggagaccgaggaggtgcagaccaggcctccggagaaaggagtcctgctttctgtgaaggctgatgttccacgaaagaagtccaagagaatgaagggaacggtgtccttcagagtcctgccgttctgccccgtggtgccctggaacttcttcgggagccaagcac

SEQ ID NO: 2039 - DNA, 412 bp, Bos taurus
  unsure (358): Clone ID: 26-LIB3057-021-Q1-K1-G5
gagtatggctaccagccccctggggcaccccctgacctcgggcccacacctgcctccagctgtggccctcagcctagaagaagggctcgagatacccggttctgaggacctgtgggcaggctgttgtctagactgagtgtctaggatggctgtacttttgagaagcctctaactgctcaaggtctccaacaaaacttgagtttacgaaagtgggcctccttatcctgcttccccttccctctggctcctggaaagggacttttgtgaagagtgacaggtgtggagtctctgccgggttctagattgcttaagaagcaacatcctaagtcagtgtgtaggtcaacttgccacagcatanataaaatacaatattatgtagagaaagaagaagggttactttgccttctacata

SEQ ID NO: 2040 - DNA, 216 bp, Bos taurus
  Clone ID: 27-LIB3057-004-Q1-K1-G3
gattggtttaccaccaggcgccccacgaacgtgcggtgcgtgacggacgaggttcctgccgggtttccatcatcgctacgtgtaccgataccaaggactatccataccggaccaatattccgacacacatcaaggaacgcatcttaacttgatcttcagacttacacaatgcaccaaaacaaaatttataaatacgaactctaaaaacactatact

SEQ ID NO: 2041 - DNA, 424 bp, Bos taurus
  Clone ID: 27-LIB3057-008-Q1-K1-G3
aaaattataacgggaaaacaaactggattataattaaatctggttcttgggaaatccactgaaataactgttaggaaatctcaagaacaaaaagatatcaaaaagtaataatcaagtaattatttttggtaagcggtgataattgtggacatggcttcaacttgaatgattcaagttctataaagaatcatacatgtcaattttgagggtcaaatatgttaattagtaaataacttaaggatataaatgactaaataaataaagttaagtaagtaatcattaaagaaacaagtgaataggtaaagtataaatggatgttaggactgagtatataatatgcatggaagattaatcagcacctggagcatcgcaatgttgtgtgagtttgccgtcattatttcatgtcagtcaggctgctgtgggc

SEQ ID NO: 2042 - DNA, 126 bp, Bos taurus
  Clone ID: 27-LIB3057-010-Q1-K1-G11
gcgagcggacgcccttttttttttttttttcatccattacgatgaatctacaaaaacacggaggtcattactatttagaagttatctaacaagcttaaacaactacttctgataaaggaaagctac

SEQ ID NO: 2043 - DNA, 282 bp, Bos taurus
  Clone ID: 27-LIB3057-012-Q1-K1-G3
tcgcggaagctcccgaagggcccggctggcttgtgtcctgcgctttccaactctttggtccgggactggtttgtcccgcttcgtgggcccccgcgggcctgtctgttccgtgaggcattgaagctctttggacccttaattttgccttgggcgcaagtcttgcttgttgcaagccaactaaaattctggtgatcttttgtgattaaccgggctacggggaccttggcttctattggcaccccaacttcaacaattccaatcttgaacaatttggcccaaggg

SEQ ID NO: 2044 - DNA, 287 bp, Bos taurus
  Clone ID: 27-LIB3057-013-Q1-K1-G3
ttgtattaaatttcttttttccaaaagtaatttttattgaaaaatttttattcaaacgctgattttaataaaattgctaacacccattataaaaaaacccctatttacaactcatcttactaccctctaactcacaccacccaacaactgcccctacataaagctccaatcatgtccttagcaacatcttcattaaaacttctaataacacatattctacctttttcatccatctattacactatcccaattataaaagatttcatatatatctttctcctcatatc

SEQ ID NO: 2045 - DNA, 282 bp, Bos taurus
  Clone ID: 27-LIB3057-015-Q1-K1-G3
tctagatcgcgagcggccgccctttttttttttttttcttttatatttttttttttttgttatgtttttttttttagtttttttttattttttttttttaactttgggcccaggtcccacctttcccgaacccaaactttattttttcgacaaccattttgtttgttttcccaaacctttcccaaccaaaacggaatcctttaaggtactaacccttaaatctaactttacaaaacaaccctttaaaccaagttgcctaaaaccctaaccccttttataaaa

SEQ ID NO: 2046 - DNA, 297 bp, Bos taurus
  Clone ID: 27-LIB3057-017-Q1-K1-G11
ccggattcccggtcgacccacgctcccggaccctggcggcgcgtgtcggactcttggcaaagctgaaccctatcccttgggtgtggaaagataggagttgcaggtcgtaggagttgatgatcctgaccagataggatggaaacgaggattatatgttaactttctcaggcattccttttaactggatggttcttctgctttttgcctgaccacttcactgcagaagttgggccattcagattggtcttcctaacaagtggatcctgattgtgaggattcactacttcctggatatta

SEQ ID NO: 2047 - DNA, 270 bp, Bos taurus
  Clone ID: 27-LIB3057-017-Q1-K1-G3
cttggtcagggtcgtattccaagctgcaccagattcttccccggacagatcttaaagagtggtagagaatacagaaaaataaggaagcaatggtcatataacagcaccagtgtcatgatagaaggaaaatgcaatactgtgttttggagctttgggagtcacctaattcaaaattgggtagtgggagatgttttggagaggaagtgttccaggcagaggaaaaagttaggccaggcctggagctgatagaatgtaatacattctggcagc

SEQ ID NO: 2048 - DNA, 297 bp, Bos taurus
  Clone ID: 27-LIB3057-018-Q1-K1-G11
gtctccggctctgccagagcaacgatccgctgttattttatggcacagattcttgtatgtaggggccttctttgaaaaatacacttttcatttgttttctgatatttatgttcttttcttgcttactccagggctggtagtatagttggaaatgccagcacctggctttcagttagaacaggctgtactcaattacaacctacggcatttactttgattgatataattgatttcccttatgtatgtactatagtcttgtgcatatgtagttgatctttcgttggaatatatgcccta

SEQ ID NO: 2049 - DNA, 351 bp, Bos taurus
  unsure (192),(218): unsure at all n locations; Clone ID: 28-LIB3057-003-Q1-K1-G7
gcggagggagcgggaggtttgggtgcttgagtttcaccggcccggaaggggaactgcgcgcttgaggtgtccagggactgagcgtttcagatctgcttggtaaacctggtgcaccaccatgctggccgcaagacttgtgtgtctccgagcactgccttctagggttttccacccagctttcaccaaggcctnccccgctgtgaagaattccatcacanagaatcaacggctgttaacacccagcagggaatatgctaccaagacaagaattgggattcgacgtggaaaaacaacccaagaactcaaggaggcagctttggaaccatcggtggaaaaaatttttaaaaattg

SEQ ID NO: 2050 - DNA, 384 bp, Bos taurus
  Clone ID: 28-LIB3057-004-Q1-K1-G7
cggggacctgccggagcccgagcgctcgccgcggccggctgctggctctgggggaccgttgctttttgacgatctcccgccagccagcagtggcgattcaggttctcttgacacttcgttatccgaggaggtaaagaatgaagggaaaggagcaaagagaaaagcctctgatgaagagaagaatgggagtgaagagcttgtggaaaagaaagtttgtaaagcctcttcggtgatcttcagcctgaaaggctacgtggctgagcggaagggcgagcgggaagagatgcaggatgcccacgtcatcctgaacgacatcaccgcggagtgccagcccccgtccgatctcgtcacccgggtttcatactttgctgtttttgatggaca

SEQ ID NO: 2051 - DNA, 372 bp, Bos taurus
  unsure (347): Clone ID: 28-LIB3057-005-Q1-K1-G11
gggcggaggtaggggtgacggagctctcaaataacctcattacgctgtagccaagagcgtgaacagcccgggccctggccatggggcactgtcgcctttgtcatgggaagttctcctcccggagtctccgcagcatctccggcagggcacctggggagagctcagaaaggccaccccctggggaccgtgttttcatccgggatttccagcgcctcctgggcgtggctgtccaccaggacccagctctgtcccagtttatctgcaagaactgccatgcccagttctaccagtgccacggccttctcacatctttcctgcagcgagtcaatgttcccccgacaggccgncggaagccttgtgcaaaggtcggtg

SEQ ID NO: 2052 - DNA, 284 bp, Bos taurus
  Clone ID: 28-LIB3057-005-Q1-K1-G7
gggagctcaggtcgccagggatactcgggagttcgaggggtgctttcttctgatcccgccaaccccggcccgctgtgccctcacggacctactcttctgtttgtaaaggtgaaccaagggaaagaagaaacacggaggttttatgcctgctcagcttgtagagacagaaaagattgtaatttttttcaatgggaagatgaaaagttgtcaggagccagacttgctgcccgggaagcccattaaccgaagctgtcagcctcctttataccgatctcagtgtgtgg

SEQ ID NO: 2053 - DNA, 421 bp, Bos taurus
  Clone ID: 28-LIB3057-007-Q1-K1-G11
cttatcttagctaccccatcacaacaaccacgatactatttctcatactctattaggcagaaacaccaccaaatgggagaggaaaaggagcagcctaagaatgacaccgagaaaaagcccgaggaggtagcccccaagaaagacgacggacccatccctgtcgtttacaaactcgacttgcattgcgagggatgcgtcaagaagatcaaacgcacctgtcgccacttcgaaggtaaatttaaatcaaatcataataattaatcactcaaattgcagtaatttttagttcatgagattccaaatttgagaaaatggcgaaaatatgatgatgcaggtgtggaaaccgttaaggcggatctatcgtcgaacaaggtgactgttaccggtaaaatggacgccgagaagctgcgagataagattg

SEQ ID NO: 2054 - DNA, 318 bp, Bos taurus
  Clone ID: 28-LIB3057-007-Q1-K1-G7
gattccattacatatcatcctttaaaataatatcattgtcttttatgataatcagttcaagtctatcacaaatattctcaattacaccgaataaaatacataaatctgacatgtatctctaatctctagcattattaaattattactactatccaataatgtaaactcaagtatcggacttttgtagctgattgaatctatagttgagtatcaaaatcacaactaatattcgacttatgtaagtgtttaaaagatgcatgcgctttcattattattaaatactagtgactacaagtttcactttatcccaaatgtact

SEQ ID NO: 2055 - DNA, 245 bp, Bos taurus
  Clone ID: 28-LIB3057-012-Q1-K1-G11
caaaatctaaagtaagagtaggaaagttaattcgaatgagtgtgattttgttgaattgaatgtgagtttccagtaggagtcttttcctgcatgttttctttttgtactttttagaagtgctaacaatacgctaatacgatcctacggtattactctctataatataagacgttaatctagactactttaaattatttctattttgttactcagacgtttttctaatctttatcactaccttatat

SEQ ID NO: 2056 - DNA, 332 bp, Bos taurus
  Clone ID: 28-LIB3057-012-Q1-K1-G7
taaagctttattgatcaaggctctgcaagaccagagcaagacccagttgttcccattgaggctctcctatcaggaagcttacacaagcctgttagcctcatctcctgttaaacagaagcaagaggaaccacattcccataactgctagtacgaaaaccacattacagaaagttaattaggatgaaaaagcacagagttatgtcccagatgaagggacaaggtaaaactccagaaaaacaactaaatgaagtggagataggtagcattctagaaaaagaattcagaataatggtagtgaagatgacccataatggagaacatgcaagatatgt

SEQ ID NO: 2057 - DNA, 308 bp, Bos taurus
  Clone ID: 28-LIB3057-014-Q1-K1-G7
cggacggtgaggcggtgagtcggtccgcagagccgttgggggtggcactcgtcggtgcgcgagaacggtccagcctggagggcggagctgtctggcctttagcccttcatccttggttaaggagatgaccaaccagtacagtattctcttcaaacaagagcaaggtgtgactgagcttcccggctatcaaagtgaaagaaggaaactctgagtctcaggactctgttaataccagctcacctggggagcccatgatgatgccatctggtcagttgcctgggggtcaaacaagaaagaaaactctgaga

SEQ ID NO: 2058 - DNA, 199 bp, Bos taurus
  Clone ID: 28-LIB3057-015-Q1-K1-G7
gtacctgaaggtgaaggtaacttgtttaaaaacaagcggatcctaatgcaacgtatcgtcaaactgaaagcttagactgctcgcacgaatcttcttgccaaatatactcatgccccaatgtctaatatcaattattttcttacccaattttccttgcaacttcctattatcctttatatacctattatacctttctttt

SEQ ID NO: 2059 - DNA, 422 bp, Bos taurus
  Clone ID: 28-LIB3057-016-Q1-K1-G11
ctcttcagttccattaacagccatttgctgaccgcacagccctggatggaagatctcggagccatgattaaccaaattgaagagattgaacggcaccttgcttaccttaaatggatttcacaaattgaagaactaagtgataacattcagcaatatctgatgaccaataatgtcccagaggcagcgtctactctggtgtttatggcagaacttgacatcaagcttcaggaatcgtcctgtactcatcttcttggtttcatgagagccacagttaaattctggcataaaattctcaaggacaagcttacaagtgattttgaggaaattttagcacagcttcactggccattcatcgcaccctctcagtctcaaactgttggcatcagtcgaccagccagtgcccctgagatatacagtaacct

SEQ ID NO: 2060 - DNA, 434 bp, Bos taurus
  Clone ID: 28-LIB3057-016-Q1-K1-G7
cagaattggaacgttctgctttggtgtgatcatgtttctccagtattacctcagcgagcgaggagagcgggtctacacgctgaagaagcttgatcctttgggacaacagacgtgctcggcccaccctgctcgattctccccagacgacaaatactctcgacaccgaatcaccatcaagaaacgcttcaaggtgctcatgacccagcagccgcgccccgtcctctgaggatgtcttaacatttcgtgtgtcttctgctgcctgccagcccccaagagactttgtgcagccaggctcttcagtctgtgagcctggaagcttgctccgacccttactcctcgaatccggtctcatctttgcctttgattatgcttgttgtgaagcagtcatggtagcatccccgtccaaggggagatatttgaatcttttcgtacct

SEQ ID NO: 2061 - DNA, 353 bp, Bos taurus
  unsure (321): Clone ID: 29-LIB3057-001-Q1-K1-H1
ttcgctctgagaccatttctgtgcctcaagaaataaaagcattgcagctgtggaatgagatagaaacacgccatccaggattggctgatgtcagaaatcaagtgatatttgctgttcgtcaagaatatgtcgagcttggagatcagctcctcctgcttcaatcaggagacgaaattgccgttatccctcccattagtggagggtaatacttttgagccacctggcttggttccagtgacagaagcaagcgttatcattgctgtgtcctcagcccacagggctgcatcccttgaagctgtgagctatgccattgatgctttnaagccagggtgcccatatggaaaaaggaaatc

SEQ ID NO: 2062 - DNA, 367 bp, Bos taurus
  Clone ID: 29-LIB3057-003-Q1-K1-H1
acgcttatttgagaagtccagggaacatgtttccaaggaagaaaaggaaaagaggaagagtaagctttgggaagaaagcactgctaaggtgaaggacaaaaaggcaggtccccgtagggtggataaaggtggtaagtacggcctttgagttgacctgccattgtccctgtgcatggaacctgatcttgatcactgcattctgccaaagcttgggaaatactgttgtgataatgccggaaggattcaattttttcctatttctctctatgtcacataaccatacatgtattttcagcttggctgtttccttctactgcatttaaaaaattacttgataattcttatataaccttggctcctatttttc

SEQ ID NO: 2063 - DNA, 438 bp, Bos taurus
  Clone ID: 29-LIB3057-004-Q1-K1-H1
cgcgagcggccgccctttttttttttttttataaatgtcatcatcatagtcttttaatgttttacataaaaaactgtatacacagcttatagaacttttatgtaaacatcataagctcaccactgtcatttgtcagtttatttaaaaaataaaaaaaacaagacaatttagtagaagtaccaccggatggggaagggagggggagaagagacacaagggggaggtttattctctgtacagagatgcagagaaaatttcacacagctttagagactgccttgagggaaaaaaataaaaacaacaaaaggttttagataggccctaatactggttactgccctttatcaaaagagtgcgcatacgtgcacaaataaaatcgcaaaatagaagtgttgccacttttttcaaaagaaaaaaattagtgggtttctttttctt

SEQ ID NO: 2064 - DNA, 219 bp, Bos taurus
  unsure (129),(140): unsure at all n locations; Clone ID: 29-LIB3057-012-Q1-K1-H1
ggagttcttcgatgccgtcacaggctttgactctgataactcttccgggaaattttcagaggcgaatcagagactcactggcgtgattcatgtggacaccagcaaaagtaatgggattggaaaagttgnggacgggcctnctcaggagaatgggattcagaagcacaggacatctctgcctgccccatgtttaccagaagcgacttcagcgtgtggagc

SEQ ID NO: 2065 - DNA, 420 bp, Bos taurus
  Clone ID: 29-LIB3057-014-Q1-K1-H1
tgcggagtaaacagtcattcggcagacgcctgtgggtggtatcggaggggctagtcgacgatgaaccgcctccaagacgactacgacccgtacgcagttgaggagcctagcgacgaggagccggctttgagcagttctgaagatgaggtggatgtgcttttacatggaactcctgaccaaaaacgaaaacttatcagagaatgccttactggggaaagtgaatcctctagtgaagatgaatttgaaaaagaaatggaagctgaattaaattctaccataaaaacaatggaggacaagttatcttctctagaaacagggtcttcaggagatgggatagttggaacagctccgacaaagtactatgacaatatatattttgattctgattctgaagatgaagacaaagcagcacaagtgacc

SEQ ID NO: 2066 - DNA, 345 bp, Bos taurus
  Clone ID: 29-LIB3057-022-Q1-K1-H9
acacaatggcaacagagagcggttgagatccgtagacattcccgtgcaaaggcctgggtggaactgcttactcttaactctcccagacctcctcgttctcagcctgtgacctcccagctgcccgccccatcccctttttccctggagcatcctccgttggatctgtggccaagaaaccgatccctccagcgccttcctgctacgcgggaagacagaccccttcccccccggggtgttacttttgattagtttgatcatttggtgatacttataaagcacgctcgctaggtgccaggcgtggcatttactttagatgcatgaattcacccagtcttcggacatgac

SEQ ID NO: 2067 - DNA, 248 bp, Bos taurus
  Clone ID: 29-LIB3057-024-Q1-K1-H9
gggacacgccgcgcagacgccatggaagtggtgctgctcttcctgtgtggcctcctgggcccagctatcctggctcagtgccaactgacatgataaagaaaggacccataccatatgactaccataccctgacaattgattgattgacttatgaagtgctttcctaatgtgaaatgctctcacctgacaaacagactgaacttaaattcagactgcatgtttaggaaacataactcagaactattgat

SEQ ID NO: 2068 - DNA, 101 bp, Bos taurus
  Clone ID: 29-LIB3057-025-Q1-K1-H1
gcgagagggactggagcccggagcgctttgggcctcaaggaggagaatgcgtgtcaccgctgtccccctcccaaacaccaacacaccccacccaaccccca

SEQ ID NO: 2069 - DNA, 220 bp, Bos taurus
  Clone ID: 30-LIB3057-003-Q1-K1-H9
gcgaggcctgcccgcgccctctcagctgcaccgtctgtgccagcacattcggctagcatattatcacatgggcgacaactatatataataatagcacacatctgtagaactctatcactataaaaatcgtgcattgcattaatctgacaccattttgaaaataggctattatcaaccagtgcttgacgttctggagcaactgcctcacgactgtcagacc

SEQ ID NO: 2070 - DNA, 409 bp, Bos taurus
  Clone ID: 30-LIB3057-005-Q1-K1-H5
gagtgggtaagccttatcgtggtgtgaagcctgttttcagcatcggggatgaggaagaatacgacacagatgaaatcgacagttcttcaatgtcagatgatgatagaaaagaggttgtgaacattcagacttggataaacaagccagatgtcaagcatcattttccttgtaaagaagtgaaagaaagtggacacatgtttcctagtcatctgttggttactgcaacacatatgtactggttaaagggagattctttcacgaaaaggattggcctatatacagtctcgacaagcactaaattctgtagttaaaataacatccaaaaaaaaacatcctgagctaattaccttcaagtatggaaacagtagcgcttcaggaatagaaatcttggcaatcgaaaggtatttga

SEQ ID NO: 2071 - DNA, 356 bp, Bos taurus
  Clone ID: 30-LIB3057-006-Q1-K1-H5
atggctccctctattggggttgggatgggaggagaaagtaacttttttttgtatatgataagcagtgtcatacctaagcatttctcctgtaggactgccttgctggtatggcttcctgctgtgtcttactttctgagaagttttatcttcccacctccacttggatactgcctctaggacctgagcagaacagcagtaaaggactgacacacaggaatggagtaggtcctgatccattttctctaacccttgctgtgcatgtatccttccttctcccagaaggaactgtttggactgttccttggactgattgggttgcactctacaggggtaagggaagcatagtaatggggcct

SEQ ID NO: 2072 - DNA, 402 bp, Bos taurus
  Clone ID: 30-LIB3057-008-Q1-K1-H5
cggacgcgtggggttttctgtgccctaaatcaaactataaatatgtggggggaaattaggtccatcaaactgtggcatatttactctaaaacaatattcccagtatgtgcgcagcatgaagtattagtgcttttcagtgttctgagtataccttctctttatatacaggatattcacatactagttttagttttattatactccataacttttgaaacatcaaggagttcagtcatcctagcatttcatgattaaataaatagtagcctatgagatacttagcaattttccctttagggactgttctctagcaaggaagagcagcatgtccagacagtgttcgaagttctttggctctgaggccgccagctcatttggagtctgtcagggatgatgttttga

SEQ ID NO: 2073 - DNA, 245 bp, Bos taurus
  Clone ID: 30-LIB3057-008-Q1-K1-H9
cgcaattcggctctaggccgcgcagtaactaatcctatcttagatttcaattcacgtggtctttaaaacttcctggcctcaacactcattcactcaaacgtctacagtctaccacatactaccatctatccaacatacatacactttcaatccaacaactatatcatcaaccagctaatctataaaccaatcacttcttagcaccaaatgttaaaaccctaactccaatgatagtagctactctt

SEQ ID NO: 2074 - DNA, 411 bp, Bos taurus
  Clone ID: 30-LIB3057-010-Q1-K1-H5
gcggggccccgccagcaccccagcctgtcccacgagtgtgtccccccaggtttgcctgggaagacgagtacgagaagttcaagctctacctcaccatcatcctcattctcatctccttcacctgccgcttcctcctcaactccagggtgacagacgctgccttcaacttcctgctggtctggtattactgcaccctgaccatccgtgagagcatcctcatcaacaacggctcccggtgggcgagggcggggccccgcccccagggtgggggggcgcccctggagctgccctgcaaagtggggggcagtgggggagccatggctgagaagcagggggtactggctccttcccactgcagccccgcttcctgccccccgagccctgatcctggggctgaggggacaggggtga

SEQ ID NO: 2075 - DNA, 67 bp, Bos taurus
  Clone ID: 30-LIB3057-011-Q1-K1-H5
gcgctcggtgatccaaggcgatggctggatcaccggtgacacacattgaacaacgggaaccgggccc

SEQ ID NO: 2076 - DNA, 462 bp, Bos taurus
  Clone ID: 30-LIB3057-014-Q1-K1-H5
ctctattgagaggtaattacttttgtcatctttggtgtatttttcctggccccttgctgtgcattgagatatataaaatttcttttttgccccagagaaaatacatagtattattctatatctttttttcctattcagctgtgatttcaaaatctacccaagttaatagatgttaaataactttattatttttaactactgcagagtcccttattaagtgtgcatgatatgttttaaagccatttctctattgatggatatctcagtgaattctagtgtttcacttacataagcaaggttggaaatagatacctttccagctctcttgggcaagtatttctcttggggaagccatcaaggaattagatacgtaggaatcataatgtggtgcacatttttgagcttccaaccaaggtcggcattaatgaccaagcaaagtgacttctaccaagctttaaattt

SEQ ID NO: 2077 - DNA, 432 bp, Bos taurus
  Clone ID: 30-LIB3057-016-Q1-K1-H5
ctttcctccccatctcagttgctgcttcgttcatgaagccacagttgctcctgctagatggtaccttttcttcttctgatctgctctattggagattatacagtaagtcccctccatgtgaaccttcaagttgcaaactttcaaaagatgtgcgcatgcatctggttccaggaaggaaccaaaacctgtgccatcaacatcaggcatgagtgagattgtacctctcttactccgcctcttattgctgatgatccttcagctctaccatctcctacctcctctccctcctccagtcagtaactcttcttgtctgttcactgtgccagcctctgtaggccagctattgtactgtgctactatacttttcaaggtactgtactgtaagatttaaactgttttctttaccttttgttttcttgtttttatttattt

SEQ ID NO: 2078 - DNA, 375 bp, Bos taurus
  Clone ID: 30-LIB3057-019-Q1-K1-H5
cggacgcgtgggtgaaaaactgggaatcacatataagttcatcctgaattttgatactgccctcccctcccccgaggtggaccacattcgaagtcagcaggaaaaaaaaagtgatattgagaagaaatgcatgattttggagtcgctttggaggaaatactttctctgtgcctaaagaaactgaaaccagactgataaaagaaattttgtaacctaaataaggaacagcattgtctgacttgagcaaatgttggtggtccacattaagacatatttttaaaactttaaaaagtgttcataattaaaactgtagtaaactacatttcattttgggggggaaaaatcccaaagtatttggtgtttggtattaaaagg

SEQ ID NO: 2079 - DNA, 325 bp, Bos taurus
  Clone ID: 30-LIB3057-023-Q1-K1-H9
atgcgtacaatagtcaggcacatggagacaggtccattagctctgatgcttctatggggctgaatttgctggctgatccgacccagactcgtctgtcgtggccatgaatgcggttgctacctctatgtgggcttcgtgctgtgggctactgaacgaagtcatggggactggagctgtcaggggccagcaatctggatttgcaggaggcactggtccattcagatttacaccaaattctgatttttctgcttacccaccagcttttgcataaggcccaaatttaactctgaaaccatcctggcctctactggtcagttttttatat

SEQ ID NO: 2080 - DNA, 359 bp, Bos taurus
  Clone ID: 31-LIB3057-002-Q1-K1-H11
gccttttattcgccagcgcccgctcggggcctggcccggctgccattttgtggctgggccggcatttcgcgcagccgcgggcgtagggctgtggggggcggggccggcgaccgcgcgccgggctgcccccgggaacgaaggcgggcgggtcgcctttgttcttcgcctgtgtcctgctggctgggctcaggctctgtcgccacccgccccggacacgcgtcgggtgagcacgcggtgtgtgaacctctgaaaagcatcgagaggcgtgcacggagtccaagtgcttcctgccctctaagcccttgaaaagtgggatctctcaccccagcacttggtgtgtgaaaaggatcagttttacg

SEQ ID NO: 2081 - DNA, 438 bp, Bos taurus
  unsure (290): Clone ID: 31-LIB3057-002-Q1-K1-H3
cggacgcgtgggtggcgcctctgacacgaagctgggtggggtagagtagagggtggtagttgcggcaggtgggagaaggagggaggcggcggtgaatcacttataaatgactccgaagcaggacctggagactaaattccaggaggataatggttattcatgaccaagaaggaaagacctgagacatggaatgagcgattgcagcccttcagtatgacacagattcacatcaagataaagatgatgtgccaagaaaacccatgcccccaaagagattacagccactcctncagacagatccagcgggaataaccacaaaagtcaccttggggccacttaatagaacagggtgagagctccatgaccccaactaggtagggtctgtgagtcccatgtcagcattaaagaagttacagaagactgccgtctgtcccttat

SEQ ID NO: 2082 - DNA, 357 bp, Bos taurus
  unsure (341): Clone ID: 31-LIB3057-004-Q1-K1-H11
gttctagatcgcgagcggccgcccttttttttttttttttttttttttttaaaagacagtgacgttggttttatggatcaaaaccagaattttcatgtttcacaattttggtgctagagatccccaaactgcctaactcactggggaaggtttctgaaggtgtgcattatagtaaacagcagcaaaatacccaacaacgttactgctaaaagcagctgctcctgcttgcgcctttagaatactagccgtaaaacagcaaaaacccgcacatctgtgtcagcagttgggatgtgagctactctaaacaacaaacaactgtgaacagtccaaggcaggacctntacaatcatactgggc

SEQ ID NO: 2083 - DNA, 168 bp, Bos taurus
  Clone ID: 31-LIB3057-004-Q1-K1-H3
ggggtcctgtctcctgtctgcctgtgcaggtgctaggatacaggggggcggcttcataaatcgtgtcaccttcacatacagaccttttcattatgaccttactattatgctacgtatacctattataaccccacttttacatttgctgtccttgctattgtctacaat

SEQ ID NO: 2084 - DNA, 449 bp, Bos taurus
  unsure (372),(389): unsure at all n locations; Clone ID: 31-LIB3057-005-Q1-K1-H3
cggacgcgtgggcggacgcgtggggaagaagaggatgaggctgagtatttccgccaggctgtaggcgaggagcctgatgaagacatgtttccaaaggcagccaagaggaggcggcccactgggcccccaggcaagaagcagcggctgaaggaacggaagccggaccgaggcagtgatcggaggcctcaaaaggccaagggcaagggcccaggggcccaggccaaggtgggacccaggggggctgccaggaaccgtggacaaggccgacctcggccactgaagagagcagcctgaggccaagcctgggtggcagatggaacgccccagattggggcccgagagacactgtgctgggctcccctcctgggcctncaggcgcagcccttggnttcctttcataaaggagagctgctttcccactttcccctctaataaattcatttctcgtg

SEQ ID NO: 2085 - DNA, 296 bp, Bos taurus
  Clone ID: 31-LIB3057-008-Q1-K1-H3
cactgaaagactattaagcaacaaataaatgtgaaggtggaatctgtttttactcaataataaaatctgtacagccttaaaaaaaaaaggccatgagaaaatggatatacatatgaagattatcaagacactaaaaaatagaatatagtatcataccgaacagaaaaactaaagtggcaatgatctgagagaactaaaaaaaaaaaaaaaaaaaggggcggcggcttaaaaggtacaaagtttactaccgcgtaattccaaactaaaacttttttaaaagggccaccaaattcaaa

SEQ ID NO: 2086 - DNA, 104 bp, Bos taurus
  Clone ID: 31-LIB3057-010-Q1-K1-H3
acttcagcttgacacacgctcccttctacttgctgctgctcttgtatcacttcacgctgaccattcataactgcatgctcatccacatcgactacctgtgggcc

SEQ ID NO: 2087 - DNA, 416 bp, Bos taurus
  Clone ID: 31-LIB3057-012-Q1-K1-H3
cttcggtccccttgcttggaaggaagaaagggtttaagggaacttatccccaatttcttcaaatgtctaactggttctggttccctgaatcttgtatttattccttcaattgaattaaacatttccccgttaaattcctgcctttaaagcaacctcaaatgccaaaagtatcttggggccccggccttaaacttacggttgctaaacttttttggggtacctgcccccctgagaatttgatgagaccgacagattgaaacgcacacactgttctctcggtacagaaactgggctggcacagactgatcggagagtgcatgctgggttccgctgcgggggcacggtgggtctgctgagagaagggagaggcctctacaccagatgcgcacagacttttctctggaaggctaaatact

SEQ ID NO: 2088 - DNA, 423 bp, Bos taurus
  Clone ID: 31-LIB3057-021-Q1-K1-H3
tttaacctgcttattaaaagggaattgctttaattgggttctaataagtaaagtatgatagtgatttttataggaatccagtgttttgaagaactggcctattgtgtttatattttgaaaacaaaatggaaaagccacttaaaatagtatgaagtaatctaaattactatgtcagttgccaaatcatttaaatttgtgtattcaccaggtctaaagatagattgtggctgctagaattccagttttaattgaagagctaaataagtcaaatgtacaagtattagatttcttaatgatcatattttgcagttttagaaaaagtgaaatattgttacacatttattaaatacacttcttccatgccacaaataggttaatcctgctgaatgttttgagttaaagttgatactgtatccatgagtg

SEQ ID NO: 2089 - DNA, 249 bp, Bos taurus
  Clone ID: 31-LIB3057-024-Q1-K1-H3
gtgaatcataccaccatggacgcattagttcgtccaaaagggtccgctgtgcgcttctttgtgtcaaatctactttgtccaggtgggtctcaccccgttgtccaatggcctgcaactgccagtatccttcgagaccttttaccgtcagtcatgtgtccactcatccatgaccttctcgaaatgtcaacgaattgataacggtatcccagggcaaaaggtcataccatggcctaacagctgcatacctct

SEQ ID NO: 2090 - DNA, 337 bp, Bos taurus
  Clone ID: 31-LIB3057-025-Q1-K1-H3
gagggacttgaatgaccgacctggctaagctgaccccttgaaggcgacacaggatgtggagcagatcggaaccggctccttgtctgatgctcgtttcccatcgaatatgtcggaaagctttctcagatccacggaaaaggttttggtcgcagcatgtgctattggatttgtggtgtctttgtacattatcatgtttacaaagcaacgtagtgacacctgtagtccggtgtgatccactttctgagacagagtgactgacagaagagttaaacactttattttacagtgtactgtgatgtgtataaattgatgtttaacaataaaattttaagttggt

SEQ ID NO: 2091 - DNA, 382 bp, Bos taurus
  Clone ID: 32-LIB3057-001-Q1-K1-H11
gttctagatcgcgagcggccgccctttttttttttttttttttttttctctctcggtttctcttttttcctatcttgtctgaaatggcttccccacaggacatttttaaatgattcttaattgcagggtagccaagtggagtatgtctgttgctggcatgtgaacactggctggacctgtgcaatgtagtaattgctaaagttggcatctgctacatagggggccggctggtaatagcaagtgacattggccacgttagggatgacattctggtcagctagcacccggatagccagcattgtgatcaggtttaaagtctgtcttctttcatgtcccatcagacacacggtactctcattcaccactccatgaagggtcatga

SEQ ID NO: 2092 - DNA, 378 bp, Bos taurus
  Clone ID: 32-LIB3057-004-Q1-K1-H7
cggacgcgtgggtctgagtgcaagaaagaaggaaaaggagccaagtcaaatgtatgcagttggttcctcttagaatgatagctcccactgttcaactatttaataatctggattatgcacaaccagaggtgaaatgaagacatttccccttacaaatgggtgttttcaaatgcgttaagttaaccttgagagagaagtgcctgtaatctctgttcctggtgtcattttaaagcttttgcttcgtgattgtgtagccgtttaaaaccttgtcgcagcaaatgtgattaacaagtttacaaagcaacactgtagcttatgcttcattttaaaagttgcttgacatttatctatagtcaaagcaatgattataaacaacaa

SEQ ID NO: 2093 - DNA, 419 bp, Bos taurus
  Clone ID: 32-LIB3057-007-Q1-K1-H11
gcaagccaaggacgaaacaagccgaagatgagcgaactcgagaattcagaaatatgaaaaagaagagaagtaaaactgaactcgataatctcgttgaactcaggacaaattgaatacttaatttctcttctctctagaaacgtatagacgaaacaatttctatgactatttctgcttctgcttcagatgcaaccttttagtttttgcagttgccacttcatgtcttcatcccttcttctaattctccgatctccgatgtttcccttcccaagaagacctcaacaaccgatcttggaggcgcgcatcacaaccatgcttcatcgccgaagatttatttgctacttctttttcacaatttccaattgcgacttgccggaagttgcagaagaggctgaagctctcctttcacgagcaacgcg

SEQ ID NO: 2094 - DNA, 244 bp, Bos taurus
  Clone ID: 32-LIB3057-010-Q1-K1-H7
atcgcgagcggccgcccttttttttttttattattataccatttggtaattaaccggctaggtgcttaacaaagagctgacctggctggtgttagacgaccactgtcacctccaagattcctagtgacctgaggaagaagctctggccttggggacaacgccggactacgcgctagtgctgctctatcacatcaccggccttcattaaaacttcatgacctaacacatatcagagctgaacgca

SEQ ID NO: 2095 - DNA, 220 bp, Bos taurus
  Clone ID: 32-LIB3057-011-Q1-K1-H11
ggagagtcggtctggcgcgtgcccacctggcccggaaggccagcggagtcgggcccagggaccaacatcaacccttgggcccgaggcctgccgacccgggagccccgggcaaagccgtggaacttctgggcaaagtctaccctcaggacgactacagcaacctgacccgcaaggtcctgtacaaggggggccggaacctgcacaaccaaccgcagcaccc

SEQ ID NO: 2096 - DNA, 399 bp, Bos taurus
  Clone ID: 32-LIB3057-012-Q1-K1-H11
ctgaaatacttaggaaatatctgtcattttggaggagtgtacaagtttgtttctttcgttacttctgttatatttgagattaaaattactcttttatctttataggtaaccttccttgaagaagttactgagtattacataagcggtgatgaggatcgaaaaggaccatgggaagaatttgcacgggatggatgcaggttccagaaacgaattcaagaaacagaagaagctattggatactgcttgacatttgagcacagagaaaaagatgtttaaataaacttcaagcaaacatgtttcaaaggacttaatgttttcgagcaatgttaagatgattcgacagcctctggccctagcatacactacctcttacttgagagggtacttttaaaaaccaaa

SEQ ID NO: 2097 - DNA, 426 bp, Bos taurus
  Clone ID: 32-LIB3057-013-Q1-K1-H11
gttctagatcgcgagcggccgcccttttttttttttttttttttttttttttgttttggagagaaaacaaaccacgcaggagctttattagaatgattattcttgaagttaaccattgataaattcattcaggggaacaatttgctttcaatgatcagaagcccacagatacacaccagatgtagctaaaaggacaagaaaaatgcacagcacggcgctcctggctgcagcactgcaaggtgccaaggatgcgccttcatctctgcagcacgtgtgcagcggtccacagactggcccagcgctgcctggttttaagaatccttaaaagatgccggttccgggaggttgccaggaggaggctacacacccaggtggcatctccaaaagccagcctctgtttataggaacatctcagtgatgaagaaa

SEQ ID NO: 2098 - DNA, 245 bp, Bos taurus
  Clone ID: 32-LIB3057-016-Q1-K1-H7
aaagaaggcctcagagccaccagactgcccaatgcagttacgggttactgatgccagtgtatgactgcctttgaaatgatgcaagaggaagaaatcatggtcctgtcacctttgtttcctcatcaccggctcctgactcctcctgactgtgagcacctgccttagggacacagttgttgaggcaggagcatgctgtgttcccctctccactacctgagaataaaagccactattctgtttcttcc

SEQ ID NO: 2099 - DNA, 382 bp, Bos taurus
  Clone ID: 32-LIB3057-017-Q1-K1-H7
tcgacccaagccttccggaaaaggaattttattatccacattcaattccatttaaaatttaatctaatctactctagattaggataataaagtgctttcttttaattgacacagaaagcaagtagctcttaaaatcctcttttctcatttttaataaatagtagagcaactaaaaatcatagtctagataaaatcatgctttcctgtttgaaaaaaaagttaaaacattgaaattattaaccataataagtaataaaaaaagtccactccaagtatgtgttatctgttatttcttttagctttcccctagacaatttcccataacacaaggacttgtcaaaaacacttctgaaaattgacagtgttttagaataatgaacta

SEQ ID NO: 2100 - DNA, 214 bp, Bos taurus
  Clone ID: 32-LIB3057-019-Q1-K1-H11
gtccaacgttctgtgatgatatgatgtgagtcacaggatgaaaatattgaccaaaatcctagaccaggtctttaccagaagcacctaagactccatgtgaaaactgcagtgtaacttcatgccagtgagccactatctcctgtttatgacatggggtctttttcttgaaacaagttgctaagggctgaaaataaagaagccaaaaatgctactg

SEQ ID NO: 2101 - DNA, 240 bp, Bos taurus
  Clone ID: 33-LIB3057-001-Q1-K1-A2
cggacgcgtgggtcgcgagcggccgcccatttttttttttttttttttttttttgggtggacccaacagctaaatttttgtaattctagggtatatatactgggggcggggggtgggggtgggaatagcacaagaagttcatcattcacgacattgatgacacccatgggtttgtgatagcagagttggctaatgttctgcatgaacgagtaggcgaattaatggaccaaaatgccgttt

SEQ ID NO: 2102 - DNA, 112 bp, Bos taurus
  Clone ID: 33-LIB3057-002-Q1-K1-A10
ttcccattcgacccacgcgtacgctcataacttcgcgtcagaacactttatcattttgaattacaatcatcctctctacgctctgcattatacacactatacgcatcctcaa

SEQ ID NO: 2103 - DNA, 426 bp, Bos taurus
  Clone ID: 33-LIB3057-008-Q1-K1-A2
gttttcttttgttctgagggagccaggcgggcggtggggtggaagggggagtgagttggccacaggcaactgttacgtaggcttggcttactgggttcggctcctgtgggtttggttctggttggtttctgtttaggtctggagtgcaactctggctggtggcaccaggagtctttaacaaatttatttttcagcagcggagaggtagatgtaactggcagagcaacttttttttagtaccttctccaaaacatccttcccatcagcaaacgttggtaaaaatgactccatctggctggttggcagacatttattttgctttttaaaaattggcccctacttccccatttgtccaaacggtccccaagatctccagtcttggtatctccaagttcatggtctcagggccccgcttttgctaaaact

SEQ ID NO: 2104 - DNA, 433 bp, Bos taurus
  Clone ID: 33-LIB3057-013-Q1-K1-A2
ctttaaaatctagtttaccatcaacttgtaaaattatttgagaaaatacagaacttgtgttagttacatgtttatatggaacctgcatataaggtatttgggggcatatgtttaaaagggaacaccacctctgaattctctctctaaggcagaaacagtggtcccgaatcactgtgctcatacctaagttgaaacttatttctacttttatgctgatatgatttaagctggccaatcagtgttttaaataaggaagaaagataattcgtaaggctgatgttatacaactgaaagtagttagaaatatgctctctactattctaccaaatttctgttccctctctcgttatacactgatcaagaatttctgatattttaaaattagaaattatgtacagagtattttaaatcattgggttttctttttgttttt

SEQ ID NO: 2105 - DNA, 389 bp, Bos taurus
  unsure (287),(318),(346): unsure at all n locations; Clone ID: 34-LIB3057-001-Q1-K1-A10
ctggaaattggaagggagtgctcattaaacagagtcacgggtgctgcaggagcacgaaatcaccctagatgacccaggtgaagatggtgtctctgagagcttccagcttctacagattgatgtgggatgtgagcattgggagcaagagaccctgcccacaggcagtgcagcgtggtgctcgttctcaaacaattttgttttctggataacataagaaaaatgtccaaagaaagcagaggcactgggaaaagatagttgcggcaaagaagagtaaaagaatacaaganatagagagacgaatagccaaccgtgtagaanattcaggcatctacccgcagcacagcanacgttttctgagatccctattcaaggaaagacttttggaagcc

SEQ ID NO: 2106 - DNA, 393 bp, Bos taurus
  unsure (336): Clone ID: 34-LIB3057-007-Q1-K1-A10
ctaatttcctcaatcctggttttggaattcgacaatggagcagaagaggagcagcaagatgtacaacctgttcgtgaagcacttggacgggaaaaccctaaccctcctattcccctctccgatcctctacgcgagttccatcaaggatcgcctcttccaactcactggaatccccgcccaccaccagcgcctcgtcaccggctgtcgccacctcaacgatgacaaatccgctatccagtgctccccgggggacggcaacatgtttccctccgtgcgcctcctcctgcgcctcaagggcggcaagggaggctttggctcgcttctccgtggcgccgncaccaaggccggccagaagaagaccaacaatttcgacgcgtgccgcgacatgagtgg

SEQ ID NO: 2107 - DNA, 144 bp, Bos taurus
  Clone ID: 34-LIB3057-009-Q1-K1-A10
cttgtatacaactattaacttgtgtaattattgcaatggaataaatttacaaatttagatacatgatctgcatgctatgtaagacaaatatgctaaatgatttccaaaataaaagtaatgctctcttctaaaaaaaaaaacaaa

SEQ ID NO: 2108 - DNA, 267 bp, Bos taurus
  Clone ID: 34-LIB3057-009-Q1-K1-A6
ggtgggggagccatttctattttatttattgattaatttattattttatttattgatgagtctctctgcggggtggggtgggggagcggacaggggctggttggggtggcttagcagatccggacggacagggccatctgtcctcgtgtgcccaactcccccttcctgggccctccccgaccgccagtcctctccctctgccccgacgaccttatgtacggatttgctctccggaaggaattctgatttcacgtgatcctgcctgcg

SEQ ID NO: 2109 - DNA, 529 bp, Bos taurus
  unsure (335): Clone ID: 34-LIB3057-015-Q1-K1-A6
tccctggtctacccactcgtccggttctagatcgcgagctgccgccctttttttttttttttttttttttttttttgttttgttttttttttatgtttggttattttttttttttttttttttttttttttttttttttttttttttttttttttttttttttttttttttttttgtttttttttttttttttttttttttttttttgttttttttttttttttttttttttttttgttttttttttttttttttttttttttttttttttttttttttttttttttttttttttttttttttttttttttttttttttttttttttgttttttntttttttttgttttgtttttttttttttttttttttttttttttgttttttttttttttttttttttttgtttttttttttttttttttttttttttttttttttttttgttttttttttttttttgttttttttttttttttttttttttttttttttttttttttttttttttttttttttttttttttttt

SEQ ID NO: 2110 - DNA, 255 bp, Bos taurus
  Clone ID: 34-LIB3057-017-Q1-K1-A6
cgaccacgcgtccggtggggtaaacttggtgaagccttgaaaattagtctgattagtttggcctcgatgctaggggagcttcttcaagggggaatgccagactcttgggaacacgtagatgtcgggggtaagccaaaccactgtataaggcctgtgccatctttgtggggtgccagtttttcttggcaggacttctctccggattggacttcagataacatttcctgatataggttctcttctgccttactgagg

SEQ ID NO: 2111 - DNA, 318 bp, Bos taurus
  Clone ID: 34-LIB3057-020-Q1-K1-A6
acccacgcgtgcgccttcccccaccccgaggccgggctggaccggaccccgagccgccaccgcccgcttctggcattcagtggatgaaggtctgctggagatcatgaccaaggacggcggcgatatgccggcccctctggaggtgtccaccgtgccggccgtggaggacgtgatctccgtggagtccaacggcgacatgaaggaactgatggatcacctgaatgccaagcctgcacgccactgtatcaagacgtgagggccatgcagcacgccttttacgagcaaacatggaacattcaactgctctgaccgacatga

SEQ ID NO: 2112 - DNA, 366 bp, Bos taurus
  Clone ID: 34-LIB3057-021-Q1-K1-A6
tctagatcccagcggccgcccttttttttttttttttagaatagggtataatttattttgtccgttgattttgggagaccagtttccatataaaaagtagcttacaatcctttcttttgatgagctgcatcttaggaggaaaagcctcttttaggataatatacaaacactcattgccaaatcatgatcaaaacatttaaaaacagcattaagtttaaaaagctatatcaattcgtataagcaatattttgattacgtttattccatttctctaaatggcaataactcctctgcagtaatgttgctatgtgcatgatccatcttgagctacaattcaatttactttccatcaaacattaatgaaat

SEQ ID NO: 2113 - DNA, 150 bp, Bos taurus
  Clone ID: 34-LIB3057-022-Q1-K1-A6
aaagaaaagtatatcacaagaatcagcatgatcaccttaaccttttataaaccgctacaggtttatagcagagaaattaggtgcggtcatgattcttatccacgccttcttatacatgttacatcacctgacttctccctatatatgacg

SEQ ID NO: 2114 - DNA, 321 bp, Bos taurus
  Clone ID: 35-LIB3057-001-Q1-K1-A4
tcggccaagctctacctggcgcggcacctgctcatcctgctgctcagcgtggcgcccgtctgctacctgtgcacctactacgccacccagaagcagaacgagttcacctgtgcgctgggcgccgtcccggggggcggcccggccgtgcgcgtcacctgcaagctgccgtcggtgcagctgcagcgcatcgtggcgggagtggacgtggtgctcctatgcgccatgaacctcgtcatcctggtcaacctcacgcacctattgatctttcgcaagagcaacttcgtctttgacaagctgcacaaggtgggcatcaagacgcgc

SEQ ID NO: 2115 - DNA, 356 bp, Bos taurus
  unsure (346): Clone ID: 35-LIB3057-002-Q1-K1-A12
gaaattatgttttagctaaatacaataagtgtgtaacttagatttatattaactagcatctggtttgcacaactaggacacatcccaggacatttgcttcaagttgaaatttaatgagtaggaggtagtccagtgagggtgtgtgacaccacagcttgatctctccaggacactaatatcctaaaacagagaccctgctgactgaagcaacacattattgcttcagttagaaaatgcttaagggtagcctgtaaagggctgactcagaaaatgcagcaagacaaccaagagaacacttgagactgcaaaaagtaggcatattctcaaatcacatcgatcacctttntcataccatt

SEQ ID NO: 2116 - DNA, 347 bp, Bos taurus
  Clone ID: 35-LIB3057-002-Q1-K1-A4
acccaatctctagctccctgatcaacggacattttcctgtaccttaatctgtaatgtgtaacgtcttggctaatcatgttgaaaaggctccactcaacagattactaaaagaccaatacctcttcatcaattacaccatgctagactgtaatctcattcccaatccagccttctgactacctccctgtcgcgacgcaaacaacctaacttactcttattacaggtaccactgacactctatccacaagcgacacattaccccaagtgctctaaacgatcaacaacgtacaaatctttcattaacatgataaagggcctcagagatatatgtctgatcacaaatcgcc

SEQ ID NO: 2117 - DNA, 356 bp, Bos taurus
  Clone ID: 35-LIB3057-003-Q1-K1-A4
ggaccaccagcccccgggatgatgagtccagtgaagccttggaagaaaacaggggctacgtggaaattgagcagtcagagagaccttttaaaaccccaccctcaagtatagaagaggaagatagccatttctttttccaccttattatttttgctttttgtattgctattgtttatattacatatcacaacataaggaagattttccttctggttcaaagcaggaaatggcgtgatggtttttgttccaaaacagtggaatatcatcgtcttgaccagaatgttaatgaagcaatgccttctctgaagattaccaatgattatatattttaaagcactgttgatttgcattttgct

SEQ ID NO: 2118 - DNA, 136 bp, Bos taurus
  Clone ID: 35-LIB3057-006-Q1-K1-A4
gctgttcatgatcgaattacgccctactttcaattctcacacagctgactacacagggacagactaccactactatatacgatccacatatcattaacatcctggactgaccttactctgcatagtatgctctcat

SEQ ID NO: 2119 - DNA, 263 bp, Bos taurus
  Clone ID: 35-LIB3057-007-Q1-K1-A4
ctgacctggactgtgatattagttatttatgaaaaagtctgcttaaattggggaagcccttttcataaaaaccagttcccaaatattaacaccaattatgactgatttatacctcaaccacctttacagacctgtgtcaatcttaaacatgcaaagttaaataaacttactattatctaaaatacgaatattattatcaatacagtttatattcaacatactcttctaactgtaaatctttcttaacaaatattacaaacata

SEQ ID NO: 2120 - DNA, 259 bp, Bos taurus
  Clone ID: 35-LIB3057-011-Q1-K1-A4
gccagtggcacccagccccggcctgggacccccgtcctcacgctgcgccttctggggaacctgctcgtgtgtggacgcctgcacgggcgtgagccgcggtgtgggagcccaggcacagcgtcctgcacgtgcttgtgctgctgcccactgccaaggtcccctttagggcctccctggggggacctgggtgccagaagacctagtcctgggcagtgtgtgtgttcccagacctggatcccagacggctggctctgggggg

SEQ ID NO: 2121 - DNA, 216 bp, Bos taurus
  unsure (99): Clone ID: 35-LIB3057-015-Q1-K1-A4
aggggaggaggccctgaagcctaactggcgctgagctaaccctgaacccaggcggtggaagagctgtctgtacggttccttcaagcggtggtgactgtncttgggagcaggaggagcccagccgtgcggccatgctcggcgcgcaccaccgaagtgggcatttgccccaaagggccttcggaagcccagctgctcagaagttatcttacagctgat

SEQ ID NO: 2122 - DNA, 249 bp, Bos taurus
  Clone ID: 35-LIB3057-018-Q1-K1-A12
cgttatggctctgcagaacggcctgacggagctggggcctaaactaccgcgccgcgctgtgcgccgagttgaagcggcccctggtcattgatgaggtgacccctcgccctgtccagccgcacgaggtcagagttaatgttcatttctgtgggattaactttgctgatattttggcgtgtcagggtcagtatcaggagaggcatcaacttcccttcacatccggaatggaatttttctgggatgggtact

SEQ ID NO: 2123 - DNA, 441 bp, Bos taurus
  Clone ID: 35-LIB3057-020-Q1-K1-A4
cacgcctggaactgagggtctgtgtcaagagcggcgggggctgcaggagatgcctgggcgccatggggtgcagttcgaactacagagtcagtgggactacacatgaagactcgaggttatataacattaggatctcagacttagataatcgttacaagacctgcacttgctatacctgcaacaaacccagctgtcccatttgcactgaccacccttccattccccgacactttattgcccgtgaaacctgaaccttttacatgggttccttccctgtgggttaagttaaaacattccaccgattaggttaaaggcccataccaaaccttgaacccaaattagggatgggccctccaggcctgtgagacagtaaagagaatcaatattctaaggatatttaggtgtcttatttctccccctctgataactgatgtcagggcc

SEQ ID NO: 2124 - DNA, 324 bp, Bos taurus
  Clone ID: 35-LIB3057-021-Q1-K1-A4
cgcgagcggccgcccttttgtctttttatcttttctttcttggagaagaggctgctgtaatgctggggtgaggtgttcccaccacagagaacagggtcagggcttgctgcaggtaaactgcctcccccagttcaaacactgacatccttacccccaggaccttggaatgtgagtgctgtttggagtgggggcctttaaaaaggcgactggtaacagtggggccctgggcaccaagccctgatgcagggggatggacgctgatcttggggttcacatggagaatggccaaaccaaaacccttgcccaggataaggcaactggtgg

SEQ ID NO: 2125 - DNA, 401 bp, Bos taurus
  Clone ID: 36-LIB3057-001-Q1-K1-A12
gacaggaggaggtgccgggaggaagagctttcctcaccagcatattttgtttcagaaaagcagcaaactgagctggaatgaatcagaaagaattacagaatcacagccagccagagaaaggagaaagagatggggagtaagaaaaggtatgaaaatgctctgaaaaatggtcaacagaggcttttcctgggattactgatgaatttgaaacctgattctgccacttaggagctccttggagtcatccataaactgaaaataacgcatgtacctgcctcaaggggccactgcccggactccatgagcaacagcaggtccagtgccaagaggagggtgaggcgcctggcgagggcacagggaccccagctgtcctcaccccctgcctgcgagctctgcctgtg

SEQ ID NO: 2126 - DNA, 185 bp, Bos taurus
  Clone ID: 36-LIB3057-006-Q1-K1-A8
cagcttcgtcattcagatggatttttctgcagattgcaagtacatccaaatgctgcttgtgctggtggataaccacagttggctaaccaatgtcctagaaccttggaaaatagcatgaaaatggatggcaaatgccctgcttgagtagactctgatgcatgctgaccacatgctttgcatgctgg

SEQ ID NO: 2127 - DNA, 406 bp, Bos taurus
  Clone ID: 36-LIB3057-008-Q1-K1-A12
gtgaacccggcgctcgggctgcctcgccggccgcctccgccgcccagcacgactagcgcctgcatctgccgaaccagctcgggcatgcggtcccagtggccctcggcgcggcagcgctccagctcgctctccatcttcaggtaccggtgaccatgagatctctgcgactgctcagaatccccttcctgtgtggcttgctctgggccttttgtgccccgggtgccagggccgaggagcccggggccagctcctcccatcacggcagcatgggcctggataagaacacagtgcatgaccaagagcatatcatggagcatctcgaaagtgtcatcaacaaaccagaggccgaagatgtccccacaagagcttgcagctccatatttcaaaaatgcatgattatgatggc

SEQ ID NO: 2128 - DNA, 417 bp, Bos taurus
  unsure (97),(169),(172),(224)...(225),(374),(405),(407): unsure at all n locations; Clone ID: 36-LIB3057-013-Q1-K1-A8
cgctccagtagcgccttttagtggcgtccgggtcccctcggttctcccagcccaccagtgcgcgcggctgttcgcatcgcctgtcgtgcgccctctnggggcacccagccgcttgccgccgctggcgtcttcgccgcgaggctcctcggcgagggcccgcactgcgccncantgtgccagaagcgcgccccccgcgacctcggtgccgcgcccgacctgcggcnncatcgcttttgctcgggccgtgccgtggtgcccgattctgggccggacggaagaccgggccgcttccacgtgtccccgagtgccgccgacgacctggctggcagcgcgctctgtggagcccagcccgcccgctcgctcagccccgccgnctggctggcgccctcgaggaagccagctgcntngcgcccacgc

SEQ ID NO: 2129 - DNA, 308 bp, Bos taurus
  Clone ID: 36-LIB3057-014-Q1-K1-A8
gccgggtgagcaggcggaccggccgaccggacaaccagccagcagcaacgaactaactgaacgaatctaccgcttaacacatctaaccaaccgcccaccaagttaacccgagcccctccaccgtcaactcaggttcggccggcctccggcccgcctgccgcagccgtggtggcagccccgggaggagcactggcgtccgtttccttcgattctcgggatttgaagatggctgcacagtccgcgccgaaagttgtgctaaaaagcaccaccaagatgtctctaaatgagcgctttactaatatgctgaa

SEQ ID NO: 2130 - DNA, 431 bp, Bos taurus
  Clone ID: 36-LIB3057-020-Q1-K1-A8
aggagatgccagacaaaacagtgtggccacgtccagagccgttctccctcccgagccagaggaggcctctccacggcccacctggtggtgaggggcagttcagaagacccctccctcgataatccttcagctctcagttgagacaggcttccaggccgccccttgctataccttcaacaaacccagctgtcccatttgcactgcccacccttactgggcccgacacttcatggcccgtgaaacctgacccttctacatggttacctccccttggggtcaggtcagaacatgccacggataggtgtcaggcccataccagaccctgaagccaaattagggatgggccctgcaggcctgtgagacagtaaagagaatcaatgttctaaggatatttacgtgtcttatttctccctgtctgataactgatgtca

SEQ ID NO: 2131 - DNA, 246 bp, Bos taurus
  Clone ID: 36-LIB3057-024-Q1-K1-A8
ttcccactctacctcactcatccgaacatcacgaccacacaaccttttaactttctacacttatcaattatcccaatctgaaagctttactcttcaatatactttcaatctgcaaacatccattcttccaaaactactgcaaacataataccatcatcattactaccgaaatctattattaagattcttttatacccaataacactcatctttatgaccaattataccacatccattactctatat

SEQ ID NO: 2132 - DNA, 201 bp, Bos taurus
  Clone ID: 37-LIB3057-002-Q1-K1-B10
acgcaatgctttaccaccaggctcccaacgaacgttctgatccatacgctctcaaacttgtaatggctaaatagctgggtaatgcatgcttggctctaatgagtaggataaatgtggccctaacaccttgtggtttacctaagctcttatttaggccattaatgctcagtttcaattctgaccttttttttgactgtgcta

SEQ ID NO: 2133 - DNA, 389 bp, Bos taurus
  Clone ID: 37-LIB3057-006-Q1-K1-B2
cagacgcgtgcacccaaacgtcctcaaattgtcagctaataacttccatcctaggatctgccatatactcaacaatgccccggacatctgcttttacaccacataactattttgtgacaaaccccacagacagtacacagactgtgctagaatcaatcagataaaaatacctaccccgatcatttctttactctgacatcttgaaacctactgatcctagagcaacctcaaactacactgactcaatcatactacttcaaagatcttctttatatatcccttactaactgattcctgcaaatattccctacatccttccaggaacttataaaatatgctataatgctcatctattgcttctctatcaacttacaaatgatatatatttt

SEQ ID NO: 2134 - DNA, 428 bp, Bos taurus
  unsure (410): Clone ID: 37-LIB3057-008-Q1-K1-B2
tagttctagatcgcgagcggccgccctttttttttttttttttttttttttttttggtaaaataatgttttattccatggatgaacacactaccatgccacacttcactccctcctgccagatctcatggccagggccggcctcccctttcagactgagctggctgtgcagtcggtcaggccctgacaagacaaaaagcatggccagctggcactcggagtggtcctgcgggcggcaccttcatccttttcccaaacgctgatgtatcacctgaaacaatcccatgacgatcttccagccggaccaactgcaactgacattcaaagctcgtggagatgaaacgcaaaccttcgaacaccaaagagtgacgcggacctgtcttctctgcagacgaggatgtcagggacctnctgctccccggcgggagg

SEQ ID NO: 2135 - DNA, 57 bp, Bos taurus
  unsure (46)...(47),(49): unsure at all n locations; Clone ID: 37-LIB3057-011-Q1-K1-B2
ccgaatcccgggcgcccacgctcgcgaccggggccggagggccagnngnctcaagga

SEQ ID NO: 2136 - DNA, 304 bp, Bos taurus
  unsure (228),(260),(279): unsure at all n locations; Clone ID: 37-LIB3057-013-Q1-K1-B2
gggaaaggagggctaagctgtagagggaagggggagccatttctctccactggctgcggtgtccgtgctcacatttccccggaatccagaggcgtcctcggccaaggactccacaatgctggatattttcatcctgatgttctttgccatcataggcctggtcattctgtcctacattatctatctgctctagggacccgaaacggcggcgtggagcccacagctcangggggaaggatgaagctgactggccgagcatnctgcttgctgacgcaccgntcctggattccagtccaacaagagg

SEQ ID NO: 2137 - DNA, 317 bp, Bos taurus
  Clone ID: 37-LIB3057-014-Q1-K1-B2
ggaggcgctactcatttccactgttgtgagcaacttgtgcaaaccaagccagggcggggtcagtgtggtcctcagaggaacctgctgccgcctcaggtcctcacctgcagggtgggagcgaaggaaagggctgctctcgggcggagcctccctgtccatagggtctggggtgctgccctcaccaccccacacttccttcaaaaccactccagtgtcacaactgagtgttcgttttagagaccagggctgctacgctcatggagttgtgcatgtctgtaaactcagcccggctgagcctcgcactttccaacgtgcat

SEQ ID NO: 2138 - DNA, 412 bp, Bos taurus
  Clone ID: 37-LIB3057-018-Q1-K1-B10
gcccgggaagccaccgattcctgagcccagcagctctgcgctcgctatgaaaccagggttgagcctgggcgggggtggcttcggtggccgtggtggctttggtgaccgtggaggtttcgttgaggacgtgacacgttgccctgtccagtcgcactaggtcagagttaatgttcatttctgtgggattaactttgctgatattttggcgtgtcagggtcagtatcaggagaggcattatcttcccttcacacccggaatggagttttctgggatggtactggagacaggtacagatgtcagcacggtgaatgatggagattgagtcattggcctgactggctttagtggtatggcttgtgaatgcattattgtcttcaagaacctgtgggtgatttcattaaaagtgttcctt

SEQ ID NO: 2139 - DNA, 434 bp, Bos taurus
  Clone ID: 37-LIB3057-020-Q1-K1-B2
cggttctagatcgcgagcggccgccctttttttttttttctttttttttttttcgaggtcgccaaacttttattgccgtttctggctcccccagccccatcaagatccctgcttacactgggctctgctgcaaaggaatggcgttggtggccggttgttaacttctctttctctgcacactgccaatgtttaaaaggaaaatccacttactggccagggagggccatacagggtggaattcaagggcgcctatggctcagtcccacctctgctggctgcaaaatatacactatggttccaaacattttttaggggaaaggagaagagatgaattgggttgctgttgtaccccttgcccttgctgccacgtttccatggaaatgagggaggggcaggatgtagctcactctgactacctgggagggtggcaggac

SEQ ID NO: 2140 - DNA, 380 bp, Bos taurus
  Clone ID: 37-LIB3057-021-Q1-K1-B2
cggacgcgtggggacttggactgttttaaccgtaaggttagtttgtgataagaacaaaaaattcatgaatactggaagtaatatggaaatctcatggaaggcaatgttaaaaaatgtccacaaatcagcatttatagtaacattggtatagtgcagtagttttagtttgtttccttttagaaaagctgcaggaaccaagaaaggaaacatagtggttttatttgttatgcccctattattcgaagattttctttttccttaatagaggctacttcctctcaatattcaaaagttatactctggtcaacatttttgctaatgtaaaatatgtctctttacccattgctgaatctgaaaggatgttgaatttccaatcactg

SEQ ID NO: 2141 - DNA, 368 bp, Bos taurus
  unsure (260),(274),(299): unsure at all n locations; Clone ID: 38-LIB3057-003-Q1-K1-B10
gcggccatggcggggtgagtgaagtggcccgcgcccgggctgagggcaccgagggtgtagagtgctctgcgaccatgtccgggggccggagcactgggcgatgcggggcccggtcgccttggggtttcccgcggctctgcggaaggccaggagggcgcggctcgagtccggaccttttgttggacggcgcgaccggcgggtgattcctggagcgagaggcccaggaagcgtcgctcggacggaagcccggggatcccggngcgtttgtggcggngggggaccttggtctgcgccccggngcttacgatggaaaggccgcggcggtgtcacttcctcccttctctaggccttggctgtgccggcgggac

SEQ ID NO: 2142 - DNA, 221 bp, Bos taurus
  Clone ID: 38-LIB3057-007-Q1-K1-B6
tcgctagatcgcgagcgggcggcctttttttttttttttttttttttgcattaactgggagggtcgtgaatttttttccccttttcattttctcaaaggggataacacccctctatttttgggggtagaaacatccttgcatttcagggataaaaccctcttgggcacaggggataattcggttaaaatcccgctaaaatatggttgctagcatggtgctg

SEQ ID NO: 2143 - DNA, 422 bp, Bos taurus
  Clone ID: 38-LIB3057-008-Q1-K1-B6
ctgaaatgaaggaaggacctttaccacatggagttttgtgacaattttatgtgttaaacgtggtttaaaggtaggatgagctttttacctttgctttagcataaattttggtttactgaatgattgacttgagatttagaatcattcagttgtttaaagatcaaagcacaagttaaagataatgtgtatctctttaaaactgcccaagctgattagaacaagtttagaaattgagctgatctgatttcattgctgcagtctgcatgtactaaatagctttacttcacatgttgtgtacttaaaggattgtgtagatgtactggccaggttttgtcaaatcatcttttaaaagattgttttgtattttcttccggaccttcgtagaagaggctaatatgtttaagtagagataatactaatga

SEQ ID NO: 2144 - DNA, 390 bp, Bos taurus
  Clone ID: 38-LIB3057-009-Q1-K1-B6
gaaaaaatggcgccgacgtgagcgcgagcccgcggccaccgaaggagtcgccgcagccttagttggagccgctgaagccgcgggaacaagaggctgaaccaagctgaggatggatgaggaaccctcggggcccagcctggacatgccggctactgcagagcccagctccagtgagaccgacaagggggtgtccccagttctggctgctatagacaaatcctcttctatggaggaggagccgggccctgaccgggcaaccacacccccagtgtgggaacgtggagggcccaccggagggacccagcagggtgcctccccagccccagacagtggccattccggacctggacacacccttggcccaaccagcactgtctccgggaccagtga

SEQ ID NO: 2145 - DNA, 330 bp, Bos taurus
  unsure (72): Clone ID: 38-LIB3057-012-Q1-K1-B10
actgtgcttaagcaggagagaagacacgataaattataattaagacagactactgctttcaagatcggagcnattagtttacaaatactgctacatcaattaagagatgaaacaagcaagcttctctgggctaatctaggattctaagcattacaaaaaaggaatttagatagcacctttccaatacaaaccacccctgcatttttccaaatgaaccttacacaaactaactcttgaatattttttctttcttcctgaaattcaaatctcctttatatgctgttaacacatccttcctgggctttcaaatgctttcaatactaaatcagt

SEQ ID NO: 2146 - DNA, 454 bp, Bos taurus
  Clone ID: 38-LIB3057-012-Q1-K1-B6
attccctctcgacacactcttccttccaacttctcgacccttctctactattttttacataatatcttattcaactttctatagatattttaaatcatctatatctctcttacacattacgctgaattaaatatttcccaaaatcacgtctcatatattccataattattaatataatagcaatctgtctattccatgtatagtttctttcacaacttagacatatttctcttttataccttctcctggtaaaataaaagacattagatggtctctctggattcactgctcaaacacctaggttcaaattctggtttttccctgagtgaccttgcttacatcatttaacttgctaggctccacttttatgatctgaaaaataaagacattaacctgataatttctaagaaatcttccatctctaaaaatattctgtgattctgaatacagtatc

SEQ ID NO: 2147 - DNA, 375 bp, Bos taurus
  Clone ID: 38-LIB3057-014-Q1-K1-B6
ccgggatggaccacggaaatgtgagcaagtcagcagatgcagtatgccaactccaggagagctgccttacagactgcgagggggaggatggtaccatggatggtaatgatgaagggcactcctttgaactttgtccttcggaagcttctccttacataaggtccagggagcgaacctcctcgtctatagtatttgaagattctggctgtgataacgcgttcagcatagaggagcccagaatgaaccaaccccctgtgggcaaccattatgcgaataaactgtctgcacttcggcattccggtagcaaatcttcggaacctacttggtctggttctccgtcaagaccaccactttaagttaaacctactaaagctc

SEQ ID NO: 2148 - DNA, 66 bp, Bos taurus
  Clone ID: 38-LIB3057-015-Q1-K1-B6
gattcccactgcgacccactcatcccgcgcgcctcctcctgctctttcctttccaccctgactcac

SEQ ID NO: 2149 - DNA, 426 bp, Bos taurus
  Clone ID: 38-LIB3057-016-Q1-K1-B6
gtgcccccggagggggcctgggcgatgaggtgccctgtgccatgatggagggggtgggtgcctacacacagacagagccggagggtggcccgcccagtaccatggaccctgctgccatgacaggcattgagaccaagaaaggtctgggggagccattccagtccgggggctggaagggggggcacattgggacctggcgaggggagggcgaggagtgaccccagaatgagcttctcaacagccttagtccccgtgggcactcactctgtgtccatccccgtagagaaggaggacctgtgcgtgctcaagaaggaggagaaggaggagctggtggcccccgagatggccgagctggctgcgacggtgcctgagagcgccgagcctgacgctgaggccgacggtgaggagctagagggcagcgacatg

SEQ ID NO: 2150 - DNA, 236 bp, Bos taurus
  Clone ID: 38-LIB3057-019-Q1-K1-B10
ggcaaggcctactcgtactcggccaactcccagagggacctagaccaccggttctcctgagccccagggcgacccaggggctccctgggaagtagctgtatgggagggatgggtgaggggcaaaaaaagacaaaaacagacaaaaaaatccaccagagctttgtatttttgttacatactgtttctttgataattgatgtgattatgaggaaaaaaagtcctatttttatactccc

SEQ ID NO: 2151 - DNA, 240 bp, Bos taurus
  Clone ID: 38-LIB3057-020-Q1-K1-B6
gttctagatcgcgagcggccgcccttttttttttttttttttattttttattatatcctgttaatggacctgtattggttacagactttttgaagcagaatgtgactttaacactacattttcattcccaaaatttgcttaaaagcacctttccagctgttttaaaacattccttggcaggcttataatttaactactttaaacaatatttttttttgcaaaaacatcccaaaattttga

SEQ ID NO: 2152 - DNA, 275 bp, Bos taurus
  Clone ID: 38-LIB3057-022-Q1-K1-B6
cgacccacgcgtgcgagcgacctcggatactacgttccctgcaataaccatcatcccccacactacatgcactgcgcctagacaatgattccagctcgctgaatccgctccttctaatgctgcttcttccacctacgtcctccacccccacgcctcctttactctaccccttcacccttcagcttgttgacacccacaacttccatcttctgtgcctaaaccgctaccctaaaacttagcttgctcatgaagaacttactgaagaccccattcaa

SEQ ID NO: 2153 - DNA, 414 bp, Bos taurus
  Clone ID: 39-LIB3057-008-Q1-K1-B4
cggacgcgtgggggatgaggctgaggaggcttgtctttgccttccggaaccccgctccggtcctgaggtctccacccaaggtgggaaccccggagagcagcctagcagccacgtgccgccggactcgcgggcagtacagagcctgggaaagccacggcctcggaagttgctctgaagaacgagcaggctcgtcgcgtcgcgtgttgagaagcagcagtggtgtggatcagcagggttgaggcggcggctgtgcgcgtcacgacagagacgtgagcagaggccgcgtggcgcccagggagccagcgatgacagcccggcaacgggcggtgcgggggcaggaaggcgcctgaaggcagccgtgtccgcctgcagtggcagcagccccgcaggcaccccagggcatggtcctgaagt

SEQ ID NO: 2154 - DNA, 249 bp, Bos taurus
  Clone ID: 39-LIB3057-013-Q1-K1-B4
ctgccctttaccccggcagttttattaacctggtccgtatactcgtcactctatctcatacttatcacataacccgacggtttcaccgctcccattctactcgacattgcccacattgaacacaccaacttgcgcataatccatacacagacctatcctcgcactgacttacgactacatccaaccactgctgcatacctcaggtacctttacatctacatctctgacatacattcctagacttctcca

SEQ ID NO: 2155 - DNA, 408 bp, Bos taurus
  Clone ID: 39-LIB3057-014-Q1-K1-B12
ccgggtcggaccaaggcgtccgaacattttccatcaggcacttcttgaaggaaatactgctatggaagtttccttaccggtttaggtcccatatcatttttaactcagggtttcagggtaaaaatgaaaagttagaatttagtcagtatcattgcaaagaaaatccacaaaaattaactaggcagatgaagcttagtacagtagaagagcccccagtaagaagtcaggaaacttgggtggcagacctagtgtgacctcaagaaattatcgagactcatccttaaaatgagagagttggactgttaataatttgttccttattctccttctctgtaattttgtgtttaaaaaacaggggttttttcatacttttatgaaaatatccagtcatttttagcccaaattatg

SEQ ID NO: 2156 - DNA, 134 bp, Bos taurus
  Clone ID: 39-LIB3057-015-Q1-K1-B4
cttgtgtgctgctctcttggccccaatgcaccatcttccccgtgacgttcttccaacgaggcccgcttaacctacgcctgtctgctccccttgttctgtaacgtttgtacataataaaacaatggagtggagac

SEQ ID NO: 2157 - DNA, 347 bp, Bos taurus
  Clone ID: 39-LIB3057-019-Q1-K1-B4
ggtgagacctgcagcttattggggtgatgcaacactctgcagttttacggagtttggcagggacaacattttcagttggattttcattggaaatgtgaagggtgtcctgatcctttctcatgatcatatgcagaaaaataatgatatttgtgagtagggcccacatttaggcttaatctaatattacatttgtgtaactgctgcttctgaaaggcaaaaaggaaagtaatgccaccatttttaagagaattgaatagacctgttgcaagagggttctgacgaatcaatcctggtttacctaaattaaatggccttggccttcatggtaccactgaagttcatataaa

SEQ ID NO: 2158 - DNA, 429 bp, Bos taurus
  unsure (233): Clone ID: 39-LIB3057-020-Q1-K1-B4
gaaaacttcagattaacatttagtttctcatttgtaggcacatgttgcatgcaatttggagcccttggctttttaggatctttattataaatgtcttctctttaaaaagacaagttaaaatttctggtaaggttattaactagtcatatcgtaatggtattgaaaatgaccatctgttgattctaaagagccaaacagcataaaagctaggagacatggcatttgaacattgntgttattgcttgccagagtaacccagatttgtatacttccaaccgtgtagagaacttattttttgcatctaacaaactaataaataataatagtaataaatcttgactaactctaaagaataaacacattgtaaagtgttgctaatatagattccagtaaattgaccataaacacaatagttcagtttttatgcta

SEQ ID NO: 2159 - DNA, 372 bp, Bos taurus
  Clone ID: 40-LIB3057-001-Q1-K1-B12
caaggaagcccctgttccctcgataacatctctggcaaggaagcttctcagcttgcagttcagattccaggaatctctgcagcacatacattttagcagggaggacgccatcctcaatcccagccctggaattcttcatgtttttagtgcttaggggaaagagaggaaagcagttggatcccattcaaatccatctccttccttcctttttccttgcctccctctccagagaggtggtccccttctcaggtcatcagtaacaaggttgttgcccatgagtcctaggcaggctcacaggacacaggcagggaggagcaaagatcaaaccaggatgggtaagggggaaagcaaggctgagaagtgggcaaggaa

SEQ ID NO: 2160 - DNA, 358 bp, Bos taurus
  Clone ID: 40-LIB3057-003-Q1-K1-B12
gggttatagtcggcgcgactgaatccgaatgggcagcagctggttggacatccgcgggacgctctggggtgaggagctgggtcagcagggcaggggcggcccacctgccggggcttgaggtagaagctgcgcacgcggtctgctgggcggtccctggcctgggtacctctgagattcacggtctagggtgtcaagtgcttcctcagtcttgtctgtggcatctgggcaaccccggctgtgagcacctgtgcccccgagggtgcgtagccttcgccatcagcccccgtagcaccttacactttggtgacagcaccccccgatgttgccaaacgtgcccagggtaatgggtcccgtgaga

SEQ ID NO: 2161 - DNA, 53 bp, Bos taurus
  Clone ID: 40-LIB3057-003-Q1-K1-B8
tcggctggtaccctgtacacatctttttcaaactggagagccttcaagtccct

SEQ ID NO: 2162 - DNA, 75 bp, Bos taurus
  Clone ID: 40-LIB3057-006-Q1-K1-B8
cttcatttaatagacaatcaaatgaaaatccttacttatgattgagagaaagaacttcggattaaaatttgtcac

SEQ ID NO: 2163 - DNA, 323 bp, Bos taurus
  Clone ID: 40-LIB3057-007-Q1-K1-B12
cggacgcgtgggtgctaaccctcacaactaagaaggcaactttctaaagcttatagagtgggtttaagttatcgcaataaataaaacttcatgagaaggttagttgtaatagaagtggaaaactttgtaaaggaataatacctttcatgaatttccttatctttgtgttgtctctggttctgttttgctaaactcaaataaataaaattgtataaaaataaaaaaaacagaaaataaaataaacacatatgcatagaaaaaaaggataaataatctaaacaaccaaactcaacaatgacataaagatttgtatatccaaagac

SEQ ID NO: 2164 - DNA, 171 bp, Bos taurus
  Clone ID: 40-LIB3057-008-Q1-K1-B8
gtatctaaacccgtctaccacaatttacttgccaactaccacctatgccttataggcaggttttactcttccaaacttggcttattctattacttacagccttgaatcagtcctacttattaatccactaaacatcctactatcattaatcttaatctaatatcatttcac

SEQ ID NO: 2165 - DNA, 444 bp, Bos taurus
  Clone ID: 40-LIB3057-009-Q1-K1-B8
tttcttcaaaaattctgtaacaaacatatttaatgtggtgttgccataatgtaatttcagtgttcttacaggataaatccatcttatgaatattttgcagaaaatttggggtatattttctttttaatgatcagaaattcagaggtgctcaattccttgtaaaatctcttgacatacagtttactgtattagtggctgattatttatgctttatgaacttaaataatgttcatgaaaattaacttacggcataattttaagttgtagaaataaattgttgattgcaacttaacagtcctagaagataagcagggaacaactccaagaagtgttttctattttacttgatttagtgacaaccaggaaaacttgagttagcactttgaaacctaaagacatgattaaattgggtggaatgcacttctaaatgttgaaattaaaatt

SEQ ID NO: 2166 - DNA, 136 bp, Bos taurus
  Clone ID: 40-LIB3057-013-Q1-K1-B12
taccgttcgattcccggtcgacccacctccgaacactcgtgtgcagtctggcattttattgcgattctgtggccacggacggtttatcacaggtcatgacttgagctctattgatctcaacaatattactgtctta

SEQ ID NO: 2167 - DNA, 395 bp, Bos taurus
  Clone ID: 40-LIB3057-016-Q1-K1-B12
cggggatggagagtccgtgggatctctttacggcctatggactggaggccgagcccaggtccgcagccgagctcagcgcccggcgtattcgcccgctgtgctctccatcagttcctctggcttggaagcctcgagaacatggcaaggcaacggtggtttaacgggaaggacggtgactgataacctgcgaactaaagcgagagtgagcctcctcacgctcgagaccaagagtgatcttgaacttgtggctgctactagatttttgccaacaccatgctcgtatgctgcggcttatgcactgtagtggggacagggtaaccgtagacttgccttacgtcatactgatacacgttacatcacgtacagtctgttcacctttgatcggcggcagcatg

SEQ ID NO: 2168 - DNA, 421 bp, Bos taurus
  unsure (19): Clone ID: 40-LIB3057-020-Q1-K1-B12
tggggagtctgcggggagncggtgcctggcagggcggccatctggccagggcaggccggctgggccagccccagggcgtgcggagccggggtagcacagacagcgaggaggaggacgacgactactatgaggacgaggacggccggtcccgcggcagacccgggcccccctgctaccccagtgccggccgccagcctccgggccccagctggacagctgcctttgacccagtgcctacggacggcccggccggcccccaggactgcagggacaaggagccccgcggtgagcatccagaccttccggccccgagcccgactggccctgcggcccccagcaccctgcatctcaggtttcaggatcctgcccccgcctacgtacctcaagaagccacagacagcagcaaagcatcggacccgcg

SEQ ID NO: 2169 - DNA, 157 bp, Bos taurus
  Clone ID: 40-LIB3057-021-Q1-K1-B8
acccacgcgttcgcggacgcttgttcgcggagagacttacttttctgcaactcttcattaatgctaagtgttgatggctcacaacaggaggacctgaccttcctggcacaagacattcttgtttttggtaaccctagttctcctcccttaggagacc

SEQ ID NO: 2170 - DNA, 302 bp, Bos taurus
  Clone ID: 40-LIB3057-024-Q1-K1-B8
tctagatcgcgagctgcctccctttttttttttttcataaatacattgactcaaaggatcgattaattactcctttctatattctgtacattcttgatattcttctgtctttgccctactttgaatataattttagtttcacaatgaagatttttttcttttagcctatttgtaatgtttgagttaatttgtaatgttgatagtttctactttctacaaatccagcacctgttcttatagttgtctaaattttcttaggtgttaataatttgtttcccttttatccccatcttcaatcaccc

SEQ ID NO: 2171 - DNA, 375 bp, Bos taurus
  Clone ID: 41-LIB3057-001-Q1-K1-C2
tcgaaacactttaaaacatacttttattcctaactagggaattcccagcattctaattggctaaatgtacttaatagcacatgtactctaaagagatagagacttttaaagaatattattcactggaatgtagaaagcacgtatttttgccatgttttagagtatacgtaccttgtgagtttgaaaccttcaaaaaaacgtggtttttggtcttctcacaaatgctgacagattagtatgtaacttttccttgtagatattacaaagaaacaggatggacattttgatacaccaccacatttatttgctaaggtaagaagtttttataagaaccctcatttgtaaattatgtttgaaagaaggttgtgggttttt

SEQ ID NO: 2172 - DNA, 131 bp, Bos taurus
  Clone ID: 41-LIB3057-004-Q1-K1-C2
ataaatctacaaaaacatcttcatcataagaacactaactcaacatattagagattataaaactatctcaatacaaaatcattataaaaacctaaagaattaaaaatatttaacctcaaaattacttccca

SEQ ID NO: 2173 - DNA, 293 bp, Bos taurus
  Clone ID: 41-LIB3057-009-Q1-K1-C2
taaaacttttttaacctacagtcttaatgtgcagaaaccagaatctttttaggagatttttacacgatcaatgcatcttactaatattttgcacaaaatttcaaatatattatctttttaattatcataaattcaaaggttctcaattccttgtaaaatctcttgacatacagtttactgtattattggctgattatttatgctttatgaacttaaataatgttcatgaaaattaacttacggcataattttaagatacagaaatgaatttaatgttaatatttaacagtcct

SEQ ID NO: 2174 - DNA, 151 bp, Bos taurus
  Clone ID: 41-LIB3057-015-Q1-K1-C2
ccacgcgtccgagatcgcgagcgtcctcccttcacctatttactttttattaaaggaaccccaaatgctgtcctggttaaataccatagatatgaatgaataaaacaaacaacttctggaacgcattgatattatatttttccatctaatt

SEQ ID NO: 2175 - DNA, 127 bp, Bos taurus
  Clone ID: 41-LIB3057-019-Q1-K1-C2
ctagatcgcgagcggccgccctttttttttttttttatattttttttttttatttttggggaaggaataattttttattaaataatagagtattagaaaataaaaaaaattttaagaaatgtaaaaa

SEQ ID NO: 2176 - DNA, 337 bp, Bos taurus
  unsure (328): Clone ID: 41-LIB3057-021-Q1-K1-C2
cccacatacccgtctccccgtattcctcgccaatggctgaccaactctttcagcgcaaaccctgggaccccgagcagcttcgcccggaccccgactctgactccgaaggcctgtttgacaaggctcctccggaagagccccccgctgtccgtgggcccaagtcggcttgggccgcgggcaggaaggccggtcggcgcactggcgggaaggcgcagggggcccgcccctggcagccgcctaagggcgcgacgcgcccccagccccaggaagaggcccctccattggatgaaggctgctatctcgaccattttccgcacctctccatctntatctacgc

SEQ ID NO: 2177 - DNA, 333 bp, Bos taurus
  Clone ID: 41-LIB3057-022-Q1-K1-C10
ctggtttcttcgaacaacctggaagtacttttcttgtgatcttcattgaggagttagaggtgtgctacaactgttctgggttaacggggcatttgtggaatggcatagaggtggcaggacaccgctgctgcagagtggcggtgtgccgtgtagttctgtgaatgcggtgcacttttcttgttcatactgcatctatctatctcaacttcatgattcgttgaaagtaatttaccaatctttcatattttactacagataatattctcttttttttctttatcaattttttttaaatttttttggagtggtattttatttatttattttttttta

SEQ ID NO: 2178 - DNA, 431 bp, Bos taurus
  Clone ID: 41-LIB3057-022-Q1-K1-C2
ggaggtctagctcaggctcagttttctcacatcggtgcttctcttcatgctagaacggcttatgtctacagagtccctgaagaagcgaaaatcatttttttagccttaaacatagcatatggagttcttccccagctcctggcctatcgctgtatctacagacccgaattcttcataaaaacaaaggcagatgaaaaagttgaatgaaaacattgttttatgttctttctctccagatgactgacttttgctatcttggtacccatatctggccccattccactctcttcttgcacaggaacatttgcgaatacatcagttcttgctctatactctgtatcgtacgaattatgtgggtaaatctttttttgaaggaaagttgaagttattcagaaagtctgtttaaagaaatacatttcagggtatttgtg

SEQ ID NO: 2179 - DNA, 225 bp, Bos taurus
  Clone ID: 41-LIB3057-024-Q1-K1-C2
caatcctcttcttatttaaacacattatttaaataactcacttcaaacctatccatttctttaccatctcttcatttaccacttaccttcattacacttaccccttcatttcctcaatttcattctccccaaaaaactattattactacactcccaaatttactcaaaattaccttttaaacatcaccaacttccacttcctcttttaccttatatatatattat

SEQ ID NO: 2180 - DNA, 417 bp, Bos taurus
  Clone ID: 42-LIB3057-007-Q1-K1-C6
tttatgctttttttttttttttttttttttttttttttttttttttttattcgtgggtaattgtaatattattttcttctatccttttcatcacaaatgatcaattgtctcttgtttcatagccatactgattaactatctcccatgattatgctctttaaataaaagggttgtcaataccagagccttttcaactgcaagatcttcaggctctgatgagtctcatgtggccactgcacctgcagatatctgctctcgaacggtttgacctgatgaaactatgggaccatttggacctcacgatcagagattacagcttcctggcaacataggtattgactgtcacctcaacgcgacggcatcacacaacaaaagccaagttcataaaactctacctgatgttctagcacaaccttt

SEQ ID NO: 2181 - DNA, 219 bp, Bos taurus
  Clone ID: 42-LIB3057-011-Q1-K1-C10
cggacgcgtgggatcaaaattaatttattaatgagtgtgaaggtgtaacaatgttcatggtaattttataagagtatgatgaaaatcctcttactttcatgctgataacaatgcttagttcatatctatactttttaaccattatcacctatatattatttaccatattctttctatattatcataggaatcatttcattattgctaataatatatctt

SEQ ID NO: 2182 - DNA, 310 bp, Bos taurus
  Clone ID: 42-LIB3057-013-Q1-K1-C6
cgagcggcccctttttttttttttttgctacatatatgcatatttttatttttagaaggaatcccaattaacacagcagtggttcttagaaaatgggataagaatgagaaaaactttcattgttcactctttctgtactgttaacttttcaaacagcatatgtattactgaaaatggtgggttatcagggtgatgagcatattgggccatttttccttctcaatacttctatcaataaacacaaaactggagacttccctggcagtccaatgtttaagattttttgctgcccatacagggagtgtgggtt

SEQ ID NO: 2183 - DNA, 264 bp, Bos taurus
  Clone ID: 42-LIB3057-025-Q1-K1-C6
gtcaagcaccaggcgcgccacatacgtacggtgcgtataccagagacggagcgggggcggttccgagcctgccacgggtctgctgaccaaggtctctctggacctgaccctggtgctgacgtgcgtcgggctcgtgctgggcctggccaggctggacagccgcgaatggctgtttgcccagacggagcctgaccagatatacctggtcaaacaagactaccgcgacgctgtcgatctgaatccctgggcggggaaatgacttat

SEQ ID NO: 2184 - DNA, 109 bp, Bos taurus
  Clone ID: 43-LIB3057-003-Q1-K1-C4
actcgtgcttcgtcttacggtccggtcgtctgctcaccagctatgatggctgcagaccggggcaggttcctgcgcttggctctggtcctgctctgcctgccctggactc

SEQ ID NO: 2185 - DNA, 349 bp, Bos taurus
  Clone ID: 43-LIB3057-007-Q1-K1-C4
ctaactctatattttctggcaagtttctatacgaagtatgatacaactcacttcatcgtaggcacagcttctctcctgagtgtgctaattcccaaaatgccacagctacatggtgttcggatctttggaattaataagtattgaaatgttttgaaatggaacaggaagttttacagctcctgagttttctgtaaggaacgagtggttagtaaactgcataatgtgaaatgagaggtagctacattggaaggccagttgctagttcttcatacgctgttttgaaatgcagattcttataggaagatgtctctgcttaatgcatctggtatctttctgaagagaagctata

SEQ ID NO: 2186 - DNA, 189 bp, Bos taurus
  Clone ID: 43-LIB3057-010-Q1-K1-C12
tacaaatacaaaataatgagaacactttttcacacttaaaggcagataaatttcaatcggtcatatgtaataatcaactaaggaacctcatagaatcaactacctacaagcttcaatacgaggtactgatccaagaatggttcactctattcaacaagaataactctctcatccagaatcatgatcatc

SEQ ID NO: 2187 - DNA, 216 bp, Bos taurus
  Clone ID: 43-LIB3057-012-Q1-K1-C4
gtttacatctcgaatggacgagtgttggacagcatgagtcagtccccatggagattatcttttataacagatttcttctggggaatagctgagtttgtggttttcgtcttcagatcttttcttcaacaatattttaaaaagtgaagtgtctactgtttcttattctattccatattttttgacagcttatgtccttcttttatatcttcttttatt

SEQ ID NO: 2188 - DNA, 318 bp, Bos taurus
  unsure (266): Clone ID: 43-LIB3057-014-Q1-K1-C4
caggaagcaaaaaaagtcatccataatcacaagcaatttagcatttgctgtgtgaggggcttacagcttgctttaggccctggctacttagctcctgttgctgtgtccccacggtttcctttttttccaagaccaaaattggcagatgaattttctacagcacagagattctttacatccctgccttgaccctaaaggaaattttaaaagaagtctacatctgcctcaccttatgctgattctggacccatggtggggagcatggngaatagccgaatctaagggtttaaatgacatcattggaactttgcttttgtt

SEQ ID NO: 2189 - DNA, 301 bp, Bos taurus
  Clone ID: 43-LIB3057-018-Q1-K1-C4
acgggacgcattttgggaatgttggagtcgctgttggctcttggtggcctggtgctgcttcggggggagggtcgaaggcacaggcgcttcggaacagggttcaaagggcggaagtggagaggaggggccataggtcacaagccagggatggaggtctcgactacttcgtgaatgcgaaaacctcagtattctcaggctgtttgttattcgctctttccagactccgtggagtgtgaggggcttagtctcctgaaggcgcttgtcaagaaatctgctttgtgttttgaagatagtttatttt

SEQ ID NO: 2190 - DNA, 300 bp, Bos taurus
  Clone ID: 43-LIB3057-024-Q1-K1-C12
gatcaatgagcctgaagctggttttcataacaaagattaaaatggaagctcaggctatgccataacctgcccacgtgctgtacttgatggctgaagctaatctgccccttctaagcaatgaatactaaggtcatcagaccaccaatggtctcactgcactggctgctcaagctgtaactgctggcatgaagacaagaaccattcagctcatactcataatgatgaggtactagactcagatgactcatataagctgtgaaccgagtactcatacacatagtgctgagtggactagccaga

SEQ ID NO: 2191 - DNA, 402 bp, Bos taurus
  Clone ID: 44-LIB3057-008-Q1-K1-C8
gttccagcgaagaggaccgagagtcgaccgcacagaagcgcattgaagagtggaagcagcggcagctggtcagtggcatggcagagagaaatgctaattttgaagcccttcctgaagattggcgagcaagactgaagagacgaaaaatggctccaaacacatagttttttacttttttgttactgtgtgctgtttttttttttttttttttaatgttcagttcagagtcttaaccagttttactgttgccaataaactataaatgttatgagggagagcatatgaatttgctgggcaagagcatacaaaattcccccatttgtgaaatgtagttttttctgttttgcccaaaggtgaggtggctgagccatttgacctggctgcctttaatctcacactggc

SEQ ID NO: 2192 - DNA, 413 bp, Bos taurus
  Clone ID: 44-LIB3057-011-Q1-K1-C12
cgcagagcttcaggccttggaacaggaacagaggcagatagatgggcgggcagccgaggtggagaagcagctaaggagcctcatggagtcaggtaccgacaggctgcaggaggaggtactgatccaagagtggttcactctggtcaacaagaagaacgctctcatccggaggcaggatcagctgcagctgctcatcgaagagcaggacttggagcggagatttgagctactgagccgggagctacgggcgatgctggccattgaagactggctgaaaacggctgcgcagcagcgccgagagcaactcttgctggaagagctggtgtcgctggtgaaccagagagacgagctggtccggaacctggaccagaaggagcggaccgccctggaggaggatgagcgcctggagcgcg

SEQ ID NO: 2193 - DNA, 57 bp, Bos taurus
  Clone ID: 44-LIB3057-015-Q1-K1-C8
actcatacactgtcaatcaactagtcatgcttaaatttcccaagcataaatccacac

SEQ ID NO: 2194 - DNA, 118 bp, Bos taurus
  Clone ID: 44-LIB3057-016-Q1-K1-C12
cccggtctacccactcttcctagatcctaactcctccctttttttttttttttattttttttttttttttgtgtttgttttattttaaatttattaaattaataaatataaataatat

SEQ ID NO: 2195 - DNA, 438 bp, Bos taurus
  Clone ID: 44-LIB3057-016-Q1-K1-C8
aggagtggttaatagttagagtttcctagttgccctagtgttgaatcttgaagagtgagtagcaattagaggcccagggaaggagatggggcaaagtttagaagaggtgcgagggtagtatgggcccagggcaatgtgcacatttgtggtctgcagtagaggcgagctccagacaaggcaccagtgaaatagggagagaggcttggtcctggggagggaatcccagtagctaccatttatagagcagtgtctcaggccagtgcgtttcaggcacccattgctgtgattcacagcagccctgtgttacagggcttgtggcattctgcttttcagatgaggaaactgaggcttcatgactggcaggcaagtatcctagtggaaaacccacacctttaatcctttgttatatggccttccagcaggaataaaagagccttt

SEQ ID NO: 2196 - DNA, 433 bp, Bos taurus
  Clone ID: 44-LIB3057-020-Q1-K1-C8
gacagccaagtgccaaatgctctctcaaattgtcagtagtagaaaacatgataaactagacacagaaaatgatgtggttctttccagactgtttgaatcatacactcatatgtatctacatctatatataaaaagaaacaaaaccctttccttgttcatacactaaccaaatctctcacagtctgaattattccacccatttctgtttctccatttattataaattgtgtgctcctaatttagtgtgatataccgacttgtgtataacggattttcaatgacatacctgccttgctctggtgcttaggagaccataaactccctccattggtaaaagagctatattagagctcctgaatagagaatgctacactggaaaggattggggtactatttagattgttgtattaattggcaatgtagcctacaagct

SEQ ID NO: 2197 - DNA, 154 bp, Bos taurus
  Clone ID: 44-LIB3057-023-Q1-K1-C12
ggaagacagcactgctttgagcgaactccacgccggtacgtgtctacggcccgtaccaggactactatgaggtggtgccccccaacgcgcacgagaccacgtatgtccgcagctactatggaccgccctacgtggggcctggaatgactcacgt

SEQ ID NO: 2198 - DNA, 302 bp, Bos taurus
  Clone ID: 44-LIB3057-025-Q1-K1-C8
gttctagatcgcgagcggccgccctttttttttttttttttttttttttttttgtttggttttttttttttttttttaaaatgtaatcccccttgaatgcaagaccctttgaaagaccccgagctcgctgttaactggacacatcctttgtgcgcccctcattgtaagctttccaggcttgatgctgccaactggctgacccgtgtcccagaatgcttctttggctggttctaattgagtttcaagtttggccttggctaacgccctattgaggggtcttttgctactgcttgtcacctggc

SEQ ID NO: 2199 - DNA, 293 bp, Bos taurus
  Clone ID: 45-LIB3057-003-Q1-K1-D2
gtcgctgatgtcatccgcattctcaagaccaacaacccagatattaccaccgacgagtgcctgattgcacttgagcaggtgtttggaagcgtggagagctccagggatgtgcaggtcagatttctgaacacttaccagaacccggtagaaaaattatctgcttatgtcattcgtctggagcccctgctgcataaggtggtggagaagggagccatagataaagagaacgtgatccaagcccgcctggaacaagtcattgcgggggccaaccacatcggggccatccgaaggca

SEQ ID NO: 2200 - DNA, 420 bp, Bos taurus
  Clone ID: 45-LIB3057-006-Q1-K1-D10
gacagccaagtgccaaatgctctctcaaattgtcagtagtagaaaacatgataaactagacacagaaaatgatgtgtttctttccagactgtttgaatcatacactcatatgtatctacatctatatataaaaagaaacaaaaccctttccttgttcatacactaaccaaatctctcacagtctgaattattccacccatttctgtttctccatttattataaattgtgtgctcctaatttagtgtgatataccgacttgtgtataacggattttcaatgacatacctgccttgctctggtgcttaggagaccataaactccctccattggtaaaagagctatattagagctcctgaatagagaatgctacactggaaaggattggggtactatttaaaatggtgtattaattggcaaat

SEQ ID NO: 2201 - DNA, 334 bp, Bos taurus
  Clone ID: 45-LIB3057-010-Q1-K1-D10
ggcgctgtgggccacggcgtggccgccttgtgcccactagtgaggacggtctgggtgttccaaggctacagcgtcaccgccctcagtgtacgactcggcggcgccgggtttcgcccactgccctgattgtggaggacttggaaggacgcggggcctgttagcgccagcgagcctgacccatgcatgtgggctggatcgccctggtcaccggcagaacgccgctcacgccctgcggcaaacctgctttctctgtggcagcggagtgaggaggccccgccagccccgagcagatgccacactcagatgtcctggtgttcccgagaccctgctcgtg

SEQ ID NO: 2202 - DNA, 70 bp, Bos taurus
  Clone ID: 45-LIB3057-011-Q1-K1-D2
atcccggccgaccccgcgtccgtatggtttagcaccaggctccccacgatcgtgcggtgcctgacggacg

SEQ ID NO: 2203 - DNA, 116 bp, Bos taurus
  Clone ID: 45-LIB3057-014-Q1-K1-D2
ctagttctagatcgcgagcggccgcccttttttttttttttttttcgtgaaactggaggtgttttattagttatcggcacacagtctataacagtcagtatacctaaccccatcac

SEQ ID NO: 2204 - DNA, 441 bp, Bos taurus
  Clone ID: 45-LIB3057-020-Q1-K1-D2
cagcattaaacttaaaacatttgcgtcaagaatcaccaataattatttatgacactttgatgtcaaatctgttgtgttgaacctttagtcatgttgggaaaatgtggaagaaattttaggaaaagtaattgccattgaagctaatgttatataaccttgaatataagagtaaattaggtattttttttaagatatgtagtttggtataaagtgacttgaaaactattatttgatacaaagcactattagagtttttgtcagctgtctcagataatatttctagtctgtgtgaaattttatttttgtagttttgcctttgtttattttctttatgaaatgtatcaactttagtgaaatatcaagtggttaatcatagcaatatataaattttaatttattgtgaacaaatgttgagtatattttcagagtcaggttgaaatg

SEQ ID NO: 2205 - DNA, 128 bp, Bos taurus
  Clone ID: 45-LIB3057-023-Q1-K1-D2
gaatttccggatcgtacctcacgcgtccggttgcttgaacttatcaccaccattgacatcaaatgttcgtcacatatatgttcccgccgtctcgtgctccttgtgatgtcaaatctactcttgtgcca

SEQ ID NO: 2206 - DNA, 416 bp, Bos taurus
  Clone ID: 46-LIB3057-008-Q1-K1-D10
ctttcttaaaaaatgcaaaatatgccagagtaaaaaacataatatgtttgtatatgggtataacttctttccaccctttgagagtcatatctatttaggaaactctgcatgccttccactgagatgtttataactcggacactcagttttctcgacagaggaagcaggcaggggctcccgcggctcctgcccctcatgtggccctgccacacgtgtccctccagaggaccagctcggcggaaccccgggatcagagcccccatgcctaccgcccgaaagtgccgtctgcctcgcgatccctcctgagcccgggtgaggctggaaggattcacccccagaaagccccagggtctgggggggaggcgctctggctcggttcccggggaaggagcagccacgtctctgtgggcaagcac

SEQ ID NO: 2207 - DNA, 447 bp, Bos taurus
  Clone ID: 46-LIB3057-010-Q1-K1-D6
gatgcttaccattaacctaccaactcttaatatccttaaattatatgatatatacagaggactgttactttttttttttttttgctttgctttatttatttgtagtaggggaagggggctaaagttctctattttctttccatcaatcctgttgtggttgggtttcctgtggagagtagtttgtcctattgcactagaacattatttacgcactaaattgagtttcagtcaattaacgaatatttattgaaacacctactatgtgccaggcattgtagggctacagtggtaagcaagacagagcccctgcccccagggagcttaagctgtcacggggacagttaaggggcaaacaataccagtgtgtgtgctgtataggaatcgtgctatttaaaataatttgtataaactataatgcttagtgcagagggcaaggtctctgcactt

SEQ ID NO: 2208 - DNA, 417 bp, Bos taurus
  Clone ID: 46-LIB3057-011-Q1-K1-D10
gatcgcgagcggccgccctttttttttttttttttttttttttttttttttggcagtctgaaatgagtgtctttattgcttgtaccgtacaaatacgaggagatggggacaggccagtggggagaaggaagaattgttggattaacaacatacacacacaggaaaaaggaaccccacccacccaaacccacccccgccccaccccagaaggtctctctgtgaactacctacaggaggtggggtggggagagcaaaaccacaaaaactaaagtccaaacacccacagatgctgggaggcaggggggcagggcaacaagtggaccccaggcgtggctcccctgctaggccagcgcccttccccctcaggatgaagtgcttgagccaagggtggggcccgagcccacttaagccacacac

SEQ ID NO: 2209 - DNA, 435 bp, Bos taurus
  Clone ID: 46-LIB3057-013-Q1-K1-D10
gtttacttgatttatacttccttcaggttttgaaagggattgtactgttatttgttgatagaagttggtatttttataggtaatttaccttcattcccatcctattttgtgctttctgacatacactgaataactcaaatagaatatgcttttatttaggtaaagaatgaaaatgaaaataatttaattacaaagagattagggagggaggtccatgaattataatttgctcagtaaaaaattttttaacttattataagaaaagatactagtaagaaacaattgcttatagtaccaaatacttagtctttccctaatagaaaattttagagggacagctccttcttctgttccctaaatgtatgccatcaagatttaaaatattcagacctgcaatctccagtggtattcctgcttactctatctggttcccct

SEQ ID NO: 2210 - DNA, 257 bp, Bos taurus
  Clone ID: 46-LIB3057-014-Q1-K1-D6
gttctagatcgcgagcggccgcccttttttttttttttttttttttttttttttttttgtgtttttaatacaaaagagcatccttttattacctctatggtaactgcatggagatacaaatttcaggaattttctctctcccagtataacaaatgcatacaatacttacaagtacaaaaaagctacttttgcttaagggacaatactaggaaactatgaatttaatgactccgctgtcctataaaaaaggtgccaaa

SEQ ID NO: 2211 - DNA, 396 bp, Bos taurus
  Clone ID: 46-LIB3057-020-Q1-K1-D6
gttctagatcgcgagcggccgccctttttttttttttttcgaaaagcaatttgtattgaagaatttggagggaaagtctcataatagtaaaaatactaaagttgagtataaaaaaacgccttggtgcagcgcagcgtctggccaggaggcgcacagggcgcagcaacggcccctgcagagggcgccgggcagggccggggcaacagcgggagtgaagcttctagaaggacaagtgctaccggggggagccatcggagagacggtcccagtgggaaaggggtgcagggagggctttctcctgagatcagaaaccccagtacgcacagacagcgataggtggcacccggcccctctatcttgccagagccccagcccggcctgatcgtgggggccacc

SEQ ID NO: 2212 - DNA, 219 bp, Bos taurus
  Clone ID: 46-LIB3057-024-Q1-K1-D6
gttctagatcgcgagctgccgccctttttttttttttttccattacttaaacaagtctgaaacttgtggtcttctctgaacctcattggtagctgtaatctactggttttcacagtgtctggcactgtctactatggcctttcttagcatttttaccttcctaaaaactttttaaggcactgttgtgttgatcatattgttactcttaatttacattta

SEQ ID NO: 2213 - DNA, 264 bp, Bos taurus
  Clone ID: 47-LIB3057-001-Q1-K1-D4
gttctagatcgctagcggccgccctttttcttttttttttttttttttttcacagggggacaattaatttattgaaattttataaaaactcaggccaagtataatacagcccaggagtacaactgttcagtgctcttttgctccttgcccctgtggcactgatggctgataaagtcccttgctctccactatccaggcttcatgcaagtcacggcatacggatttcaagctggggccaaatctcaagcatcttctgaggcattt

SEQ ID NO: 2214 - DNA, 403 bp, Bos taurus
  Clone ID: 47-LIB3057-006-Q1-K1-D12
cggacgcgtgggcggcagcaggggtcggtaggtctgcaggtattaatcggcctgtttggtaccatgccgctgtacgagggcctgggaagcggcggggagaaaacggcggtcgtgatagatctgggagaggcttttaccaaatgtggatttgctggagaaactggtccaagatgtataattcccagtgtgataaaaaaagctggcatgcctaagcctatcagagttgtacaatataacatcaatacagaagaactatattcctacctaaaggaattcatccatatactatatttcaggcatctattggtgaatcccagagaccgcagagttgtggttatcgagtctgtattatgtccttcccacttcagagagacactcactcgtgttcttttcaagtattttg

SEQ ID NO: 2215 - DNA, 419 bp, Bos taurus
  unsure (48),(340),(342): unsure at all n locations; Clone ID: 47-LIB3057-007-Q1-K1-D4
cggacgcgtggggtaagtttcgtctcttccaaccccttcctcctgctntcattaccgtgcgtccctctcttcttccctctgtctctcactttcttctttgtgcctagggctttttccccgttacagtgtaaacatgtgtatatatctaatttttttaaattaggttatattcatttcttggaatatttgataaatcttatttttattgactgtatcatcccattgtaaaaattatttttcttaattgtttcctggagttggttatttagtttaggttttctgttttattatcatgtgggcagtgaatgtcttgacatgtggatttttttctctatgtctntntccttagaataggatgataggcaatggagttactaaatagggttcatcgtaaacatttttaaggttcatgatacatg

SEQ ID NO: 2216 - DNA, 439 bp, Bos taurus
  Clone ID: 47-LIB3057-010-Q1-K1-D4
ccggttcggaattccggccacgcgtcacgcatgcttaccattaacctaccaactcttaatattcttaaattatatgatatatacagagggactggtctttttttttttttttgctttgctttatttatttgtagtatgggaaaggggctaaagttctctattttctttccatcaatactgttgtggttgggtttcctgtggagagtagtttgtcctattgcactataacattatttacgcactaaattgagtttcagtcaattaacgaatatttattgaaacacctactatgtgccacgcattgtatggctacactggtaagcaagacagagcccctgcccccaaggagcttaaactttcacggggacagtttatgggcaaacaataccagtgtgtgtgctgtataagaatcgtgctatttaaaaaaatttgtataaac

SEQ ID NO: 2217 - DNA, 227 bp, Bos taurus
  unsure (18): Clone ID: 47-LIB3057-011-Q1-K1-D4
cggacgcgtgggcgcctncgcacacatctacaccctgtgactgttcactttctgtagaggtgccaacaccactggccgtggcagagctctttgattcgaagacaatctgccgtgtgcacacatgcacaagcgcatgcatgcacacacacgcagctgtacacagtgtgggttctcagcaggagggtgtcggcattgtgtgtcctggcttcaaaaccacatttgtaatt

SEQ ID NO: 2218 - DNA, 364 bp, Bos taurus
  unsure (165): Clone ID: 47-LIB3057-013-Q1-K1-D4
ctaggttctagatcccgaaccggccgcctttttttttttttttttccttttccaatttgcgtgccttttttaccaaaatgtccaaaacctaaaattcttaaaattcacaattgatttttttaaactcttcattgaggcaacctcacactgctccctcctgccatnctctctctgccactctgagacttgagtttccaggaaggcttgtcctgcttttccacaggacagtgaatgggagttgttgtgtttcagttttttttgcttgtttatttgtttttattttttataagagaatatcagaagttttaaggtagaggtggatattttagccaagtcgaccttggggtttaaaaaaaaagagaga

SEQ ID NO: 2219 - DNA, 337 bp, Bos taurus
  Clone ID: 47-LIB3057-014-Q1-K1-D12
agccttccgaaatatccaatttacctaattggcttgaatgggttccagcacacagcctaagttgctgcatggcatgtggaaccttagttccctgaccagggatctaacccacgttcctggcatcgcaaggtggatttttaaccaccggaccaccagggaattccctcaagtaactattaagtggcctttttcactctgggcagattccaacagaacattctgtttccctcagaacaacggaaatcagtcccagtgggtggggcaccgctacccagactctgtgtttttagtaatcttagtaattcagggtaatttcagtgtagctgctggctaattc

SEQ ID NO: 2220 - DNA, 395 bp, Bos taurus
  Clone ID: 47-LIB3057-017-Q1-K1-D12
gtaggtctggatgtagtacattttctttgatatgtagatacatgttttcattgtttccatgtcgtggctattacaaatagtactgcttgaactttcttattcatgtctctttgtacacatgggcctcgtttatcctaggtatataacatgctggagatgctggacatgataatttggatttttgcttcagcagatacttgccccttccctcttctactgttggtaaggtttacttttctacccatttatattgttcttggtcatatggattcatttgattgataggatatcagcagacatgacatatgcaggagtcttaagtgtgcttgcatagtttgatttggctcctaagtttaagtgatgcccacgatctgataaaaagcctatgtctccca

SEQ ID NO: 2221 - DNA, 186 bp, Bos taurus
  Clone ID: 47-LIB3057-018-Q1-K1-D4
tcctcaccatattacacataatttaacttattcctatattcatattaactttcttcgagtcgtttctttttaacgttatcattctcttcctatcttttttccttaccacttcaccatcaactaactatctttccatatcattatttcttctctctctaattaaatctatccttatttttatctttt

SEQ ID NO: 2222 - DNA, 247 bp, Bos taurus
  Clone ID: 47-LIB3057-020-Q1-K1-D4
aaaaaaacccccttatgccaatcaacattttcccaaaatcccccaatttttcaattaccaccctcattaggaacatttcccagcattattgaccacctgtgaattaaacctttaaaaagaccaattccaccctatttaaccatcctaaaaaccttcccacatggaaaatgattccattaattctttctccttagaacataaaccccactacacacaaacatctatatttttcacccgtcccctttat

SEQ ID NO: 2223 - DNA, 382 bp, Bos taurus
  Clone ID: 48-LIB3057-005-Q1-K1-D12
ggccccgactgccggcacgttgcatcatggcgctatgcgaggctgcggcgagcgaaagtcctatggtctggcctgaggttctgatttctggagactctcataacacagtagtctttccaacgacgagaatagggagcgtaactggatgacatgctgatacagaaaatgtgacatcctgaatcgaggattgtcatgttacaacaccagatggtgcaaagttatcctcctgagactcggcatgaacgctagcgctctggacaggccagtggctgtcacgagattctttggcgccattgacagtgcgctcatagacgagaaccctaagcattacgtgcctgtggaggagtacgtggacaacctgatgagcatggtgcggcacctg

SEQ ID NO: 2224 - DNA, 358 bp, Bos taurus
  Clone ID: 48-LIB3057-006-Q1-K1-D8
tagatcgcgagcggccgcccttttttcttttctttcccttctcttccacctgctccccggtccgttgtcccgctctctccagttcttcttcctcctcctactactcctccagcacacccaggctcactcgtaccagagccaagaggctacacgcccagccgtctacgcggggaactgctccggctgggagacaacttaaggtcggcaggttgggtaggtgcgggaggagtttcagctgcgagaaccacgatccaggaggtccggagtagcatggcccggaaaagcgccttccctgccggcgcgctctggctcttgagcatcctcccgtgcctgctggtgttgcgagcggaagtcgggc

SEQ ID NO: 2225 - DNA, 441 bp, Bos taurus
  Clone ID: 48-LIB3057-012-Q1-K1-D8
tcaaaaaagccaaggttctcatccacctataaatatgaagtttacaaggccactaaagaagaattagaaaccccttgccaatccatccattgttgtaaagtatgctttgctggagggagctgttgatcagtgtgtatagcatgtgacccccgctctgtttcacaaagtcatatccgggggtgacctattgtttaggttactggtatgttattatccccacttgctggctttggcagggatcatgtcacctgaaccattcactttacacccgggacattctggccctttgcccctcttcagagcttgaaatttccacgacttccatctctccctgagccaaacaagatgccccttccactggaaaactctccagtctggactgttccaagaattatgctaatggattgctccactctcaaagcataaaccatgcacttaaaa

SEQ ID NO: 2226 - DNA, 306 bp, Bos taurus
  Clone ID: 48-LIB3057-014-Q1-K1-D8
attaaattgttttttgttattttcttggtgatatcagctgccagactttcaaggcattgtagtctttgagcaactctttaccttggtatgaatatgaatttacttgcagtccatatacgctacttttctgtactagaattataaattgtttaccataaacatccaaaaaccttaaaattgactcatatgaaatcagcattatgatgaatcctgaggtctggagtcggaccacctgggtttaaattcttgttccgtcactggttttgtagccttgagcaattaactttaatcttaaactcttgtgcc

SEQ ID NO: 2227 - DNA, 237 bp, Bos taurus
  Clone ID: 48-LIB3057-015-Q1-K1-D8
cccacgcatcctcttcaactactccatctcaacttaccattaccatgcacagcaatattatctcgcaagattacccactgctcatactactgccttctcaaacctactcatgctccatcccactatcttaatccacatcacttccaatctctctctcaacctccatctataaccttccagacctcctatacccatcccacaatgagttccacaaactactcaccctttcccatcaaa

SEQ ID NO: 2228 - DNA, 426 bp, Bos taurus
  Clone ID: 48-LIB3057-020-Q1-K1-D12
ttcttcctctgctcttggggtccgagatgtcactgtttagaagagccaaactaattttctgagggatgatccttttccaattttaactgtttccaaaatccaaggaaaaataagcattcttttggaaagcttcatagtcaaacttccttcctcctcatccccaaccccaaactataaggtcaagagtataatcaaaggacttcaactgtcataccacagtatatgttatgggaaacagacatataatttcgcgtattttaccatgctttgagttccctgagaaagtttcattctgtcatgtctccgttcggtaaaactttctgtgaaatcagctgcatagccctctgctgttgaaattctagtctctgtgttctaccaccagtttctggagacccttactccacaatttccactaacgacataact

SEQ ID NO: 2229 - DNA, 213 bp, Bos taurus
  Clone ID: 48-LIB3057-021-Q1-K1-D8
gttagatcaaccgtgtctcgaaccacgttcctttctgtagccatcgatatacacaagggggaggctttgcacagcttgcagactgacatataaggaatatcagagcgcaccgacccaccaaagctacagcaatactcaactcatacagactttgttgcctggaaataccctgagaccatgcagggacatacagtcaggaattacgacaattgt

SEQ ID NO: 2230 - DNA, 220 bp, Bos taurus
  Clone ID: 48-LIB3057-025-Q1-K1-D12
agagactcttataagtaaacattaaacttataatcaccaaactcacatctcagtgcaagttcatttccaaatgtattcaaccaaaactaaaacccacaaacaaaccaactatctatccctaatcacatcatcacctcagtcatatcaacatacaattccaccatcctaactctactataacataccgatcataccaaaaccaccactaactaaatactca

SEQ ID NO: 2231 - DNA, 300 bp, Bos taurus
  Clone ID: 48-LIB3057-025-Q1-K1-D8
ctaatgctttaacatcaaacgcgctactaacatgcggaccttgacactctaggggccggtcaaatttaactctgacatactactgccattactaatgatttgatgcaccataccacagtcctgactcactcaatatttactcctatcttatcatgatctgacactgcttaacgtctaacttcgggtacgtatcttgaccttctatctcatgatcatccagactttgtgtacgctcacaactatctcatttacacaaaataacacattgatactctgaaatcattgacatctcttatgcta

SEQ ID NO: 2232 - DNA, 373 bp, Bos taurus
  Clone ID: 49-LIB3057-004-Q1-K1-E10
cggacgcgtgggttttttttccccagaaaggaaaaaaaaaaagtggatttttgttgctaggtgattttttgtgtagtaaagaaaaatttcttcagtccatgttgtaatcttcatactgcaattttaaggttgtctaatgtatactatagtaaatagatggttttgagatttgaggctcctaagagtttgatttgctccattttttcctaaaataaatactgtctttcccaactgttatgtcctaggtattgtacttctaattttgacttcagaatcaagatgttgacatgaaccaggctgctgtggaagtacatgtatattataaattatcttatttgtgttatactcttacatgttattatcttttctaaga

SEQ ID NO: 2233 - DNA, 209 bp, Bos taurus
  Clone ID: 49-LIB3057-012-Q1-K1-E2
tcttccatattcaataaactcttcattacaatacaaatttatcacaatctattcatccactcctgcatagtcacaaccccattcactcttattatatatacataatactattgaaacccgattttaatatgaccactcaccattttaaccttctaaactctcttaacggctcaaatatattaaaaactttacacaaataaccatattat

SEQ ID NO: 2234 - DNA, 256 bp, Bos taurus
  Clone ID: 49-LIB3057-013-Q1-K1-E2
ccgagccctgtgcgcgcgcctgcagggcggacttggaccagcgccagtcctattgcgggagggagttcgcgttgaacggaatcgtgcatgatgtaaaccttctcggcacaaggatcccgctggtgactcttctggtggaccgagacgggctgtacaagatgaaccgcctgtacattactccggacgggtttttcttccgagtccacatactatccctagactcctctagttgcaataagccatgtccagagtttaa

SEQ ID NO: 2235 - DNA, 436 bp, Bos taurus
  Clone ID: 49-LIB3057-014-Q1-K1-E10
cgagctaatggtgaatgaccagctggctttagcagaactgaaggaatgcattgaaaagaggaccatggaaggacgatcttcaaaagtttactttacaatcagtatgaacctggacgtatctgaggaagcaatggtgatgttttctctggcctgtattcttccttttaaataccctgcagttctgcctgaaattactgtcaggtcagaattattaagtagatccgagcaggctcggctgaatacggatctgaccgcatacctacaaaagaactgtctcggagatgtctgtatcctgaatgccacagagtgggttcgagaacatgcctctggctacatcagcaaagacgtcaccccatcccctgctccaggaagtatagtccagccaggcgaccacgttctcacaaggctctggatctacagccatcacatctacaac

SEQ ID NO: 2236 - DNA, 440 bp, Bos taurus
  Clone ID: 49-LIB3057-020-Q1-K1-E2
ccagttactgtttccttgatttcttccttttattatttatctcttggcgaacaacccgagcttgcttagagttctgattctgaagcaacatgtaggcagtctacttctttctttcccattaaactgtaagtgtgaatggatgagaagctggttcattcaactcacatggcttgaacccatgagtacaaacccgctgctttatcttggcacaagatcccagttagccacaagcttctctgattacaagaagaaatccaaaattactactgtgataaaaagcaagcaagctttggtcaggctgactctgatggtggagaaagccaaattttgactcttagggcccaaatccttgttgatagctgtggtatttctataagatttgtgtatgtgtgatttgggtagatgatagaagtgtcttttaaggcaagtacttggcatgt

SEQ ID NO: 2237 - DNA, 401 bp, Bos taurus
  Clone ID: 49-LIB3057-024-Q1-K1-E10
acgaggacgcgtggggcgcttagccgcagccatggatcaggcagctcccgaccctgagcgggtttggcagccttcgccgctggagccgctgagccaccctgacgctgggctggagtccatggttggtgaggaaacgaagggggcccgggacgagggccccggggacggcacgatgacagaaaataatttttcgttgaagaagatagaaattagtgtttcagaagcagaaaagcgaactggaagaaatgccatgaacatgcaggaaacatatactgcttacctcattgaaacaaggtcagttgaacataatgatggtcagagtgtcctaacagactcacttgggaggcggtatagtgaatttgaagttgtgaggaactaccttttagtgtactatccacata

SEQ ID NO: 2238 - DNA, 143 bp, Bos taurus
  Clone ID: 50-LIB3057-002-Q1-K1-E6
ccacgcgtccggcagcgggcaggggtctctctccgcggtcatgaacccaccgtagcgcttgtccttaacgtgggctttataagatctaactacatcattaaactaccataccaatgcctctgtaatttcaatttttcctttcc

SEQ ID NO: 2239 - DNA, 329 bp, Bos taurus
  Clone ID: 50-LIB3057-003-Q1-K1-E6
ttcaaaccaaactgaaagtcggagactgacagactgacaaacgaatctattggtaggataaggtaaggcacgaacagaacaggctagatcttgctatatcttacatcaattgaaaaagattgcgagtatgcgcactcaagactagcagtaccctcacttgcacagctaatttgacagatgagactagactgtagctgtcactatagagcacattcaacctgccgagtatctgattctaacctagctacctataacgctagaattttaatgcccaggacacataatgtacgataccactcgatgctcaaacactttggtggtcacctttt

SEQ ID NO: 2240 - DNA, 419 bp, Bos taurus
  unsure (313): Clone ID: 50-LIB3057-006-Q1-K1-E6
cgccgagggaggcgtcgcgcactgacagcgtcgccatggagccgagggcgggggtttgcaaacaggacattcgtgagcaaatttgggactacatggaatcacaaaatttagctgattttccccggcctgttcatcacaggattcccaacttcaagggctcttatctggcttgccaaaacatcagagacctcgaggtttttgccagaacgcaggaacttaaagtggaccctgataaaccactggaaggcgtccggttgctagcgctgcagagcaaaaaaacgttgttggttccaacaccacgactgagaacggngttgtttaataagattactccaccccctggggcaactaaagacatcttgagaaaatgtgccacctctcaaggcgtgaggaactacagcactcccgtgggcttggac

SEQ ID NO: 2241 - DNA, 410 bp, Bos taurus
  unsure (362): Clone ID: 50-LIB3057-007-Q1-K1-E10
taaaggttgacttttatccagatacagtcctgataatatggagggctgtcatcttgcagcctttgctaaaattacttagtggcttcttgggcaggctctgttttctccagcggtggaaaaactgctgcttgggatttgtggtttatggatacacacacacagacaactattaatatttttgttattaattaaagactttgaactctattatgcatgctagttgttgatagaataggaaagatcatatgcttttgacgttaatttattcaatccctaaacctaaggattaaggcatttaattttctattgttataaattcttgaggcttagagaagactttgcccaagtcattcacatcaganaaactcttcaagtccagtaattgatacttatgtgcagaagacatggac

SEQ ID NO: 2242 - DNA, 370 bp, Bos taurus
  Clone ID: 50-LIB3057-010-Q1-K1-E6
atctgcttggggtcaagacactggagatgctaatgcaaatggaaaagactggggaaggagttggaatgaccgatcaatattttctggcattgggtctaccgctgagccagtttctcagtctaccacttctgattatcagtgggatgttagccgtaatcaaccctatatcgatgatgaatggtctgggttaaatggtctgtcttctgctgatcccagttctgattggaatgcgccagcagaagagtgggggaactgggtagatgaagaaagagcctcacttctgaagtcccaggaaccaattcctgatgatcaaaaagtttcagatgatgattaagaaaagggagagggagctctttcaaccggaaaatct

SEQ ID NO: 2243 - DNA, 430 bp, Bos taurus
  unsure (415): Clone ID: 50-LIB3057-013-Q1-K1-E10
cctgttattaaaagatgataatctaacctgagttactgtgaagattaaatcataatatatgaaaaagcatttaggcattatgcttggtacttaataaacatttcataaatggctcctcaactttaggatgtctgttttcagtattttagtatttctgattcagggataatattttacaagtttagtaaacatttcatgtgctagtcaataaaaagcttactagagtcaagtaaatactagactttggcttatttatattcccaggatctcacacaatacagtatgtatgaattagttagattcattagtattattacatactcagtgaatgcctgataaaatgaaacattttaaatgaaatatgaaattaacaaaaagcacagctaagatggctatcactcattgtcatattctntggtaatttgtctag

SEQ ID NO: 2244 - DNA, 141 bp, Bos taurus
  Clone ID: 50-LIB3057-023-Q1-K1-E6
aatttccgttcgacccactcgttcgaatatacccagtaaatgacctgtaaagtatattgtattcttctctaagatagttgtctgcaatgcctattaaattacctattttggcttatgtactgcataattatttaaccaatc

SEQ ID NO: 2245 - DNA, 389 bp, Bos taurus
  Clone ID: 50-LIB3057-024-Q1-K1-E6
cggactcgtgggcggacgcgtgggaatgcttcggtgatgctgggagatgggtcgggaagtaaaactaaataaatatcagttcggtcgcatttctcatataagttagaatcattgcttttaaaaagagtaatctctttagaaatggtgctaggatgaaaaaatatacttcgctccatccaaattttctttctttcttctattataaatactcttaaatcatctcaaggcacctaatccttgagaatactatcagtcttgtgataaagttctgttcacagattaagtactgctttcatgatggggggggtgtattatctttgtctttattattattttttttcttttctttattactttttttatattttttatatatattttttttatta

SEQ ID NO: 2246 - DNA, 289 bp, Bos taurus
  Clone ID: 51-LIB3057-010-Q1-K1-E4
cgcgtacgatcggcttggggtcaagacactcgagattctaattcaaatggaaaagactggcgaagggagtgggatgaccgatcaatattttctggcattgggtctaccgctgagccagtttctcagtctaccacttctgattatcaatgggatgttagccggaatcaaccctatatcgatgattaatggtctgggttaaatggtctgtcttctgctgatcccagttctgattggaatgcgccatcataagagtggttgaacttggtagattaagaaagagcctcacttt

SEQ ID NO: 2247 - DNA, 447 bp, Bos taurus
  Clone ID: 51-LIB3057-012-Q1-K1-E4
ctctcccccttacacagacataattccttcgaaatttggggaagttctgtttcatttggactctgattgaacaaattccctgtaaagccctcagagacttggagtttgaagaggctaaaacacatagagatggacaccttctcaccttctcaaatacaactgtggtagagcctgcttacccgagggtttggtgctttataagaatatcatttaaactgagtcttggtgcctaggagtttaagacattttggaatgtgtaattgtgataaaagtagcattgtttgggcttcttagttggtcattgaatttattactagtcatttcttgtgatgtattgatacagagagagcacagaatggggttctctatgaagaaacaggaagatgcacccctaaacaattttagagctggcaaaaactatacatgtgatctggtctaacctcattt

SEQ ID NO: 2248 - DNA, 367 bp, Bos taurus
  Clone ID: 51-LIB3057-017-Q1-K1-E12
tccctatcgacccactcttccttttatcaccattctccccactaacatgcttttcttgacccactagagatccaccccaccaagtaagcttttatacaataattggccctcccttatccttatcccctcttccttaccttaacctcttcccctcaatcatttctaccatcccttcctccatatataccccttcccatcatctctccaccctcatcttatctcattccatctccaccccactatcacccaccctcatcaccctactatcatataattaacacctacattatctcaattaccactttactatctacatcaaccttattctatctcttataaactcataattcatatcttcaccttctca

SEQ ID NO: 2249 - DNA, 293 bp, Bos taurus
  Clone ID: 51-LIB3057-023-Q1-K1-E4
gtccggtctgctcggccgcggccatggagaagctgcggcgggtgctaagcggccaggaggactaggagcatggcctgaccgctcatgattcacagactaatctactgaggtccttgatgcctctactctcagtttcaacaccatgctgaagtggtttgccatatgcttcgtcagtggcatcttcttctccatccttggaactggattgctgtggctccctggaggcataaagctttttgcagtgttttacacctttggaaatattgctgcgttgtccagtacaggctttttaa

SEQ ID NO: 2250 - DNA, 341 bp, Bos taurus
  Clone ID: 51-LIB3057-024-Q1-K1-E12
tggaaccactgatccatcccataattagaaccccatacaatagatggtgatgaaacaaatggggcccaacacaagagcccatgcttacataaacacatacagataacaacttaccgttacaaaagatacaactaaatgattcagaaccttaaaaacgcactggaagacatgccatcaacatacacgaaacatatactgcttacattatgtgaacaccagcaatctaaacatactattgtcacaatgtcctacaaactcaatgttgatcccaatactgaactaaagttgaaaacgaactacattttattgcactatccacatattgttgaaccaactctacc

SEQ ID NO: 2251 - DNA, 400 bp, Bos taurus
  unsure (262): Clone ID: 51-LIB3057-025-Q1-K1-E4
gggacgcgtggggcgccttaaccgcaagcattggacaaggcagtcccgaaccttaacgggttgggcaagcctgggccgctgaagccgttaacccacccgaacgcttgggctggaatccatggttggtgaggaaacgaagggggcccgggacgagggccccggggacggcacgatgacagaaaataatttttcgttgaagaagatagaaattagtgtttcagaagcagaaaagcgaactggaagaaatgccatgaacatgcangaaacatatactgcttacctcattgaaacaaggtcagttgaacataatgatggtcagagtgtcctaacagactcactgtggaggcggtatagtgaaattgagttgttgaggaactaccttttagtgtactatccacat

SEQ ID NO: 2252 - DNA, 365 bp, Bos taurus
  Clone ID: 52-LIB3057-001-Q1-K1-E12
cggacgcgtggggaacacatggctcagtggaacaggggggcgtctccctggaatcatggcttttgtgaagccagggcatcccctcctccccgctgggatcaggccaggctccaggatgttctgtgggggagcccccagccgcctgagaccccacaccagccgccttctcactccccaggggaccaactttcatactgggcagcaatgaaatgttctttcatatttaaataaataagacaactaaaaagcacccacagtcttggcatccggcactggtggcctcccccccgccaccggctgggcttgcaaggctgggatcccctactttcctttgctgctgaagacgggcgaactgagtccgcccc

SEQ ID NO: 2253 - DNA, 344 bp, Bos taurus
  Clone ID: 52-LIB3057-006-Q1-K1-E8
cggacgcgtgggtgacgccttccattatgtgcagctggggacggcctacaggggcctgcagcctgtgccagacgaagaggtgattgagctctacgggggcacccagcacattcccctctaccagatgagcggcttctacggcaagggcccttccatcaagcagttcatggacatcttctcgctgccagagatggcactgctctcctgcgtggtggaccacttcctgggccacggcctggagtttgaccaggcgcacctctacaaggatgtgacagatgccatccgagacgtgcacgtgaagggcctcatgtaccagtggatcgagcgggacatggagaagtaca

SEQ ID NO: 2254 - DNA, 424 bp, Bos taurus
  Clone ID: 52-LIB3057-007-Q1-K1-E8
accaaattcactagggaattaatctgtaaaactgattaatgtagaaaatataattagacttcatcttaattgttttatgtgcactgtgatggtagaatcagtacagtttaagataactgaattatggataattgtatttgatctcttcactagtattctcaattgagtgaccatacaagtgaaaccattcaaatttagatttggggaatggtaaaggaatcaactttttatattgcttgttgggggaaaatactgaagattatcatttcatgggtcagcagattgacttgttaagatggtaaatcagatcataagcatccagttaaagacatacaggggttgaaaactatttgaatctttgagatgttattgtcctagagacagctaaatcagtacacctaaccagtagtatgacaacctgatg

SEQ ID NO: 2255 - DNA, 412 bp, Bos taurus
  Clone ID: 52-LIB3057-009-Q1-K1-E8
cggacgcgtgggtgaactttcctttccatgctggcgcattcaccttctctactcttggcatgtaggaggtatgcattaatgtaattggaaaaatctggatttccgatgccaaagggttaaagcctcttggatttctttgcggtgatttgcagccactattttatttttgatcagtggcattttggccactgtttaattagggtactgaacatcactgtcagtactagggtttttgtttttcttgggtcttttttggcacatgtgaattttgttttgtatagaacaaaacgactttcttttggtctctgataatgggtttaaaaatcaaggagcatctggttttattgtggggatgatccggattatgttgtgactgatgtataatggttacttgtacatttttttttggatc

SEQ ID NO: 2256 - DNA, 372 bp, Bos taurus
  Clone ID: 52-LIB3057-012-Q1-K1-E12
gacatgctgtgccccgactgcggttaggacatctgagcgactccccactactcgggcggctccacctacccaggtccctgctcgagctgcactcaaacgctgtttgcttcctccgcctgccaccgggcaatgctgcaacccggtcccctggccactgcgggactttactctgcgcttctcagcgatactcacctgtttaagtcctttaatccacactctgtgcatgggaaggagaaaactcatgggaaccttaggcgggaaagggttttgactctgtaatcaagcgagaccaatccgagtgtaaaaatcattttgagtgatatctttataaacatttcttttacgcgttaaactatattataacacttaaaa

SEQ ID NO: 2257 - DNA, 201 bp, Bos taurus
  Clone ID: 52-LIB3057-015-Q1-K1-E8
tcccgctcgacccactcgtcctttctagatccgagcacctacctttttttttttttttttatatttattattgtattgtttattttaaaggtttgttatccccaaagcacatttataatttacctactgaatttcaaaacatttaatttaagaatcatccctttcataatctcccattttgatttacattgatttaaacaa

SEQ ID NO: 2258 - DNA, 197 bp, Bos taurus
  Clone ID: 52-LIB3057-019-Q1-K1-E8
gacgcgagcggtcgccctttttttttttttagttttttttttttatattattgggttggtttttattttttttttttttgaagagggaattgagagagacataaagggaatgatgttggcttgaaaacaaaactaaggggattgaatgattagaagagtaaagttaggttaacataggggggatgttaaaaagtggg

SEQ ID NO: 2259 - DNA, 334 bp, Bos taurus
  Clone ID: 52-LIB3057-021-Q1-K1-E8
tctagatcgcgagcggccgccctttatttttttttttttttttttttttttttctcagcagggcattcccttattttattgtcatctcagcaaatgtgctcatgtggcacctaaccggcatcaaaccaaagccctcagagtgacaagcgtgggctgagacaactgcaaacttcccatgtgtaggtctcaatgcctattcacatcacaacacctgttcctgtctctggtcccttagagtggcctaaatgtctcaagtgcgctaacactgccggccacaaggtggtggaaaagctgggataggaagccaagcagtgccttgaaagcaagttctttt

SEQ ID NO: 2260 - DNA, 240 bp, Bos taurus
  Clone ID: 52-LIB3057-023-Q1-K1-E8
ctagactttgaagactaaaaacctagtctttgaagaaaatatttggcaaagtgttggggttaaagtaacgtaaatgttttggttaaaatgtcaaaaaataatcactgctgtatttgtgatttattgagaactgaaagctgttttgactgtaaaattcttataatctggttcagtttaagaaatcacatatcgtttgagttgggaatatcgtaaaatatatgatattggtaagaaattgat

SEQ ID NO: 2261 - DNA, 412 bp, Bos taurus
  Clone ID: 52-LIB3057-025-Q1-K1-E12
ctagatcgcgagcggccgcctttttttttttttttttttttttttttaaaggtgcactggtgaaaaatccaaagtgtataattcatacctgccattattacatcaacataaaaaaaataggcattttaaacatttggaccaacaaaagagggcatgatttataaacacataaatatccatgcatacttttacaatgatggctactagaaaaatgagaactttaaaaatgccattctagacaagattccctttaattctaattgcctctttcctacatgtgggcatatcccagaattctaagaagctttttaagtcaatgttgcattcatgccaaccttctttccaagcctgtacctaatgatgaaagtgtgatgaatctactgcctaaactttaatgcttttgaattaattc

SEQ ID NO: 2262 - DNA, 313 bp, Bos taurus
  Clone ID: 53-LIB3057-004-Q1-K1-F10
acattgtgccttaggttggatggccgagctgtaacagaatgctgcactgtctctctggagattgatgctacctagctggcctagttagaaattctgacactgttatctaggatcggtacagacctcttagcaaggcttctaccacttataaacttctagtgatccttatgggaactgatatatgacgctagaatattcctctactcaccgcacggttatatagttattattcaggaatccagatgttctgtgctgaagttctacgtcagcacattaagttgcacaacgtttccaattacatgcgctacctgat

SEQ ID NO: 2263 - DNA, 419 bp, Bos taurus
  unsure (274): Clone ID: 53-LIB3057-005-Q1-K1-F2
ctttggaagtgaagaaaggagacccaaaagtggagcttcagtctggtctttgggggggaaataaggccggacccatgggcccttaccaaatgaaataagggttgaaacctttcaggagtaaaggtgggggacaatgctgccttaaaaactttccctcaaaaggttttcactgatgaacttaaaccagttgagggacttgttcatctggacacccttgatgggaaatcaaacagtctagatgattcaactgtagaagttcagtctatggatatgnagtggtgtttggagaagccgtgaagctgctggtagtcaaatctgagctgccggccctctgaagaaacttcaggtgtctttaactgctgaattctaaactactaaattgaaatgtaactgcattcctagttagtacgtcaaacgct

SEQ ID NO: 2264 - DNA, 359 bp, Bos taurus
  unsure (286): Clone ID: 53-LIB3057-006-Q1-K1-F2
gttctagatcgcgagcggccgcccttttttttttttttttttttttttttttttttttggttttgagaagcttttataaatgaggtttaacaaacaccaacgtgcaggtgtgttagtagcacaagtccgtggcaccgggcgcaggcgcagccacaccaaggccacggcggcaggggcggccttcaggctcctgcctcatttacaccttaaaatctcccgagactccttttctgtctgcatgtcgacagtgacgggcagcgacctttcagacccacacttactcctntctcctctgtcaaagccagggcacggggcaacggggttgaggttttagggtccaagaaggccaccccgtaacc

SEQ ID NO: 2265 - DNA, 384 bp, Bos taurus
  Clone ID: 53-LIB3057-008-Q1-K1-F2
cggacgcgtggtgaagaagagggtggtgctggagcaggatctcctgattcctttcctgggagagttcccggtactttattaccaaggttgccatcagaaccaggaatgacgttactcactatcaagattgagaaaattggcctgaaagatgccgggcaatgcattgatccctatatcacagttagtgtaaaagatctgaatggcatagatttaactcctgtgcaagatactcctgtggcttcaagaaaagaagatacgtatgttcattttaatgtggacattgagctccagaagcatgttgaaaagttaaccaaaggtgcagctattttttttgaattcaaacactacaagcctaaaaaaaggtttaccagcaccaaagtgttt

SEQ ID NO: 2266 - DNA, 426 bp, Bos taurus
  Clone ID: 53-LIB3057-010-Q1-K1-F10
ctagatcgcgagcggccgcccttttttttttttttttttgcatgcaggaaaagctttatgaagtcatagaactattataattttttttaaacagggatgtagaatactcaaacattttaaatgacctatgaaacaactggcatatatttagtaagcaagatccactttaacaattctctctgctcccaccctcaatgctcaactataggacattcatttatttatcatgtttagtatttctgtctcacagccatctgtcagaccttttgctgcaaaaacgtgttttttaacaattaaatacacaatggggagatatggttagacatttacaggacttgaaatgttgaagaataatacacaataataggatcacaagaagggcagtggtatctttcaattcattttgctatttccagtctcttttta

SEQ ID NO: 2267 - DNA, 271 bp, Bos taurus
  Clone ID: 53-LIB3057-015-Q1-K1-F2
gttctagatcgcgagcggccgcccttttttttttttttttttttttttcaaagttttagaatgtgctttaattggcttgtttccggtattaccaatccatgcctggtctctagggttctcctcctcccctcgactgggggggttccacacttgggacaggtgcaacaagggggcacagtcagtcaggattctgccctgctaggggttcctagccgcttatgccccagccacaatcattctctcatcatgacaccctttttaatgttaaagg

SEQ ID NO: 2268 - DNA, 86 bp, Bos taurus
  Clone ID: 53-LIB3057-016-Q1-K1-F2
cccactcttcctctaattctagatctctagcttcctcccttttttttttttttttttttttttttttttgttttggtttaaatttt

SEQ ID NO: 2269 - DNA, 418 bp, Bos taurus
  Clone ID: 53-LIB3057-020-Q1-K1-F2
gtagaccataaaacactcagattctggacaggacaaccattaactcctggccctcttatctaaaagaaaaacaacaggtagaccgtcaacttttggcctatatctggtcctttgtggaatggccagggttataaggtagggtcacaggacggtaactcaatgtcataagagacttagaaactgggaatcaaaagaagccataaaaatatcatgttaaacattttaaaatgtttggttagaaatggcatatgttatggacaggaaccaaccatatcaataccaaatgtacagatcaatactaatgaggatataagctgctgttagccccacctttgggggacactttgcccactctcagtgtctatgctgagagatttgtactttcttttaaaaataaatcctatttgctggctactgt

SEQ ID NO: 2270 - DNA, 79 bp, Bos taurus
  Clone ID: 53-LIB3057-022-Q1-K1-F10
gggcccctgcagttcctcagcagagtcttcaccaacagcttggtgtttggcacctttgaccgtgtctattataaactta

SEQ ID NO: 2271 - DNA, 159 bp, Bos taurus
  Clone ID: 53-LIB3057-024-Q1-K1-F10
acgttaatctgtttcttgaaatcatcaccatcatttacaacaaatgctcctagcataaaagatcgctcctacaacttctacttgctgtttcaaaactaatattgatccaatcatatcacaatcttccatatatacctcattagctcctctaaccttcta

SEQ ID NO: 2272 - DNA, 355 bp, Bos taurus
  Clone ID: 54-LIB3057-001-Q1-K1-F6
gttctccaggcgctccttacagtactgatggggtcatgcttgactgcctgctgggtcacgctgttcgcagagttcaaaatgcttaccacatggcgaattactgttatataacgtgtatgttgtaagtattacttttgaatcacctgagacaaagtatccttaaaacactcaggaaaaaagactcatagcatgaatgttattgcatttctaagtctagaaacaatatgtgcataattgctgaaaaattttgcaaatttattgagatgcttaaacaaatgcatgcttgtctgtctgattgcttcaagctttaaagcttttatcagaaaaacctgttcatgattcatacttgagatta

SEQ ID NO: 2273 - DNA, 452 bp, Bos taurus
  Clone ID: 54-LIB3057-010-Q1-K1-F6
ccgagtcgacctgtaaggggacacacagaaaaattgaataaactgtatgaattataagataatcgggagagctacctggggaagtgtaaagacggaaagtacagatagcctcactatgtatctgctaaatcgctccttgctaacgtcttctgggaaatcaccgtgcatcttcttccttacgaaatgatgagcgaatcttgagtgtgtccatcaagagaaagccagtctctgtttttcaccccttttcctttgtggagtcaccctctgtttcagcagcagcgcctccttggggctcctgccaacctcttgtgccagccttgtccgtagttctgtgccagcctggcctgcctctggcccaagtgctctggctgccccccaccccctgccctttcctgtgtgtgccccttgtgccgtcatgtctggcctgcagttcctaatctggggcccttgtg

SEQ ID NO: 2274 - DNA, 388 bp, Bos taurus
  Clone ID: 54-LIB3057-016-Q1-K1-F6
gttctagatcgcgagcggccgcccttttttttttttttttaagctggggtatggttggttcataatattacattggtttctgctgtacaaggaagtaaatcagctatgtctatatagatcccctccctcctaccctgtcccacccatctagatatattaacttttccttttcaaaattaagtggctcatatgaaaccagatgattccaggtggctcctgccccaccttcctggaagaatttccccgtgactctttatccataaggactcatgagagggttttggtcggaagactatgtgctcggggcccaccagcaccccagctcttacactggagccactagacccctccagtatacatgagctggttccttgtgttccctctgatt

SEQ ID NO: 2275 - DNA, 367 bp, Bos taurus
  Clone ID: 54-LIB3057-019-Q1-K1-F6
ttataaagtcagatttatctcagtaccccatcatgattaatgatatctttaatgcattgtattttttaattgtcaaaaaatatagtttatgatatgactttgtggtatgatgtgcttgtgaaaaagaactttaaatatttataagggttcctgggtaaattaatatatattaaagctttactatatgtcaccatcaacataacctaaaatgtaacgtaccaactagtgtgctttgtatgccaaaaagaataatgctgtgttaacatggcatttggtgttttactgtcaaagatttgcaaattatctgagaccaagttaaacagaattcatttattcagtggaataccatttatgaaatatcttctgt

SEQ ID NO: 2276 - DNA, 77 bp, Bos taurus
  Clone ID: 54-LIB3057-024-Q1-K1-F6
ttccgcggctcgacgcactcgtggccataaagattcagcaaattgagatatgatttaggtgaatgggacaatcttac

SEQ ID NO: 2277 - DNA, 460 bp, Bos taurus
  unsure (119),(414),(421): unsure at all n locations; Clone ID: 55-LIB3057-005-Q1-K1-F4
ggcttggcttgaacttgttatcccgcaactggcttgcaccaatgaaccgggtcaaaataaaacccttgggggccatggcttccttcggtggcccgaacttggttttccaggagcgagtnctgctcctcacccggcctcggctgcaggagctcagtgcgggcagccccggacccgtgaccaacaaggccaccaagattctgagacactttgaagcctcctgccgacagtggcccccttcccggaggtccccagccgagcctggccctgcagccgcccatgtgggcccgtcagacctgttgaccgacaccctgcctttcaccgggggcccggccttcctgcagcctctgagttcagctctgttttttcccaagggcagcgcacccccatcagggctgcagcccagccgtgtgcccncaacgtncccagacagctgcccccttccagtccctggggctggcaa

SEQ ID NO: 2278 - DNA, 238 bp, Bos taurus
  Clone ID: 55-LIB3057-007-Q1-K1-F4
cttgtgctgaatattcttttcatgtgccaagtctagaggagcttgttggagtcttgcagaaggggctaacggataactttgctgaagtccaggtctctgtagttgattgccctgatttaactaaggagccatttaccttttctataaaaggcatctgtggaaaaactagaattgcagaagtaggaggtgtgccttacttactggctcttgtgaatgaaaaaaaaggttattaattaaa

SEQ ID NO: 2279 - DNA, 394 bp, Bos taurus
  Clone ID: 55-LIB3057-010-Q1-K1-F4
tggaaaagaaaaatggtaatttacattcttatttattttggctgcattatccttgtaattttagagccaagaagtcacttagcctcactttgtagctgctttctcgctccttgctaaggtcttctgggaaatcaccgtgcatcttcttccttaggaaatgatgagcgaatcttgagtgtgtccatcaagagaaagccagtctctgtttttcaccccttttcctttgtggagtcaccctctgtttcagcagcagcgcctccttggggctcctgccaacctcttgtgccagccttgtccggagttctgtgccagcctggcctgcctctggcccaagtgctctggctggcccccaccccctgccctttcctgtgtgtgccccttgtgccgtcatgtc

SEQ ID NO: 2280 - DNA, 412 bp, Bos taurus
  Clone ID: 55-LIB3057-012-Q1-K1-F4
agatgaaaggtcacacacctgagacagtatcctaagatgcgtctctctgctcccgtagtcagcgtgcggagtgctgggacctggcccttcagggacttatgagcacagatggtatctgtggatacatcctgctttgccattgtcctgggcgcacccttcctgggtctcactgcatactgacttcgtccaccactgaccgcaccctcaccccatcccaccttcccccgcagggctccatctccatctggcctcatgtccccaagccgtcttgccggcagccgcgaacgtgagtgggacaatggcagcaacgcatcttccccggcctcagtgcctgagtatactggtccgcggctgtacaaggagccgagtgccaagtccaacaagttcatcatccacaatgccctgtcacact

SEQ ID NO: 2281 - DNA, 296 bp, Bos taurus
  Clone ID: 55-LIB3057-013-Q1-K1-F4
ggcggccgcggttgttagccgccgccgcttgagccggtgccaatgggccctttccgcgaagaaattggcgtctttaaccgccccgcactggcggatgaagcagctggtggggctctactgcgacaagctttctaaaaccaacttttccaacaacaatgatttccgtgctcttctgcagtctctgtatgctacttttaaggagttcaaaatgcatgagccgattgaaaacgagtacattattggattgcttcaacaacgcagtcagaccatttataatggtcattctgacaataaac

SEQ ID NO: 2282 - DNA, 343 bp, Bos taurus
  Clone ID: 55-LIB3057-017-Q1-K1-F12
cactgatccattgggtggatagccaactgtgacaaagaagaatttgtagactacataggcgtgggtctgtggtggagtttgctctgatccccctgaaagtttttaaaacctgaaactagtcagctttgactacagcataaaaacacactgctaattgttttttaagccacaatgttaaagtataacttttagattattgtaacccataaaagataagcatacatgtattaggcttctaagtctattactgaaaattatgcaaataatggaacaaaatgactgttctaaatagtttttttagttataactgtgaatttgccatgtggctattaccatgtgggta

SEQ ID NO: 2283 - DNA, 141 bp, Bos taurus
  Clone ID: 55-LIB3057-023-Q1-K1-F4
gagtcgttcactatttcacaaagaatctttaggtctcctgctcattcttatcaactatgcgctgtgattttattgcacagattctttgattgaggggccttctttgaaagatacacttttcatttgttgtctgatatttat

SEQ ID NO: 2284 - DNA, 69 bp, Bos taurus
  Clone ID: 56-LIB3057-001-Q1-K1-F8
tcccggtcgacccacgtcgtctcgtggcgcgtgggctcgaacgttctttcgtgacgggcgagggggcgg

SEQ ID NO: 2285 - DNA, 106 bp, Bos taurus
  Clone ID: 56-LIB3057-005-Q1-K1-F8
cagctacttacaggtttcagtgacaagaactgagaatttttcagtgaagtacctaaggagcatgggcttttcatcagattttaaagataataaatacattaactat

SEQ ID NO: 2286 - DNA, 345 bp, Bos taurus
  unsure (331): Clone ID: 56-LIB3057-009-Q1-K1-F12
gcggccgctcgcgggacctgccatcttgcgcccagcaagcatgcaggagggaaaggactggggcaccaaagccccgcccagcgtgggccatgccccgatgggcacatagcttatttaattaccatgagcacgcttaacctaatgttccagtgggagtcatcagggatgaagagaatcagacaaaggaaaccccaggaagtgtctgagagagcagtcctcagcatcatctcctcgggctgcccaggactaggctcgggagtaggagcccgtgtgcccttgacctggagcagctactgaagagtgggctggcacctgcctgggccttgctcangagaaccggtggag

SEQ ID NO: 2287 - DNA, 439 bp, Bos taurus
  Clone ID: 56-LIB3057-013-Q1-K1-F12
caaaatcattagtatgattaatcagcttcaacttttttctagttgtaagaataatccgaattatcctagtaggcagctactagggtcaagtattgctcttcttgggtttaaaacaaaaaaagtttacaacctgtttttggctgaaaatagagggaaatagattaaaaagtttattctcctaatagttcttcttagttttatcagctataagagcttcagttgattggacttttccctgcttaaccaaatggaacttctgtgcctgttagtctttacatatcagaattaatttaccagaacaaaggagcaatgacttgttcttaccttccatttgacattcccatgtttctcataaaagaacagtaaataggaaaaaaatttgagtgatttcaagatggttttaaaattgtattatagggtaacttttaggaaatcttca

SEQ ID NO: 2288 - DNA, 275 bp, Bos taurus
  unsure (47): Clone ID: 56-LIB3057-017-Q1-K1-F8
gaattctacatatattaattcttttataaaatctagactcaaggcantgtactctccgggttattgccttacctgaattagtcctgttgggttggtaatagattttttttttaatatacccaaatttgatttaaaagtaaactctagttattaagcacttgtaaaaagaaacccagaagcacatttttttctgcacaaaccagttacaaagttcaaaggtgtgtcttatgctttaagactcattttgtacctttgtaaaccacatctgaaagact

SEQ ID NO: 2289 - DNA, 427 bp, Bos taurus
  Clone ID: 56-LIB3057-020-Q1-K1-F12
tcttactatctcatcccccaatactcagttacacctcttcaaagcctctccttccacaaccccggagcactcatcaccaactctgaacttcccctccctctcctaccaactcacttcactactccttacttacctgactataaactctaccagaatatctccaattcccttccacactatgaagcacaaatattgacaagccaattcaagccctatcctttcaacccttctacaaatccaccactctcttcatacccaacttactattcaacgattcaatgaatatacctttattacttctaacaattatcatcgtgctttcgttaaaacaaaaacacactgcccaagcggaaatgctcaacagctgataaaacttcatctacagggtcaacaacttatcaacaacttagcactcattttcctaaaa

SEQ ID NO: 2290 - DNA, 270 bp, Bos taurus
  Clone ID: 56-LIB3057-024-Q1-K1-F8
ggaaaacatcctgatgcgttccttcattttggcacccgaaagacagttttggcgagcagcaggagatgaggagatctggagaaaagacagtctaaggaatgatacagagaaggatttgaaagttgacacaggcatcccactcagtggttccagccaagaggtcacaaaggatctgcttgatatgattgaccatacaagcatccgaactattgaagaattggctggtaaactagaatttgaaaacgagttgaaccgtgtgtgtggccattg

SEQ ID NO: 2291 - DNA, 434 bp, Bos taurus
  unsure (369): Clone ID: 56-LIB3057-025-Q1-K1-F8
cagctactctccttctcccctggttcccttgtaatccttaaaagttccattggtgtaggacattctaagcctaggttgagtgatctttttcaggtgtgggtattgaacatggaaatcttccaggagagcctttcttttattctcagaaagatttttgtcttggatatttcagtctccattttgggccatcttactctttatttattttttctcaaattggagttttatttctaatacacacatagatttatttcattacatgtacatgttaatatgcgttcttacagttttttttttcttgtgtcccaccagaacctcaaaaataaatttttcttccctgccagtccagtggttaagactctgtgcttncagtgcaagggacacaggttcaatcctgggtcctggccaccccccaatcatttttattcattata

SEQ ID NO: 2292 - DNA, 373 bp, Bos taurus
  unsure (191),(255): unsure at all n locations; Clone ID: 57-LIB3057-009-Q1-K1-G2
cggggatggagagtccgtgggatctctttacggcctctggactggaggccgagccccgcgcccggcgtctccgcccggggtgctctccgcagtttcctggcttggaagcctcgggaacatggcgaggcagcggtggtttaacgggaaggacggtgactgttagcctgtgaacgaaagcgagagtgagccgnctcacgctccggaccaagagtgatcttgaacttgtggctgctactagatttttgcccacacctnctcgtatgctgcggcttctccactggagtggggccagggtgaccgtggacttgccgcaagtcagacggctgcaggtcacagcaggtccagtctgtccacctttgagcggcggcggcat

SEQ ID NO: 2293 - DNA, 289 bp, Bos taurus
  Clone ID: 57-LIB3057-010-Q1-K1-G10
ctcgggcatcagaaaagtctgtgtactttgcttttaaaaacttaagcatgtacaaaaggtacatgtatacatacatatattaacatacagatttgcatttagccttgaaaaatcttattttaacaaattcttcctgtagctaatgcgaaacaaatttaatagttcatatgacactcttaccgtttctatatcctgaaatagcccacgattgaaacttgttattctaaagctaaaacaactactctactacaagcacattctttgattgagtcattggttataaacttac

SEQ ID NO: 2294 - DNA, 410 bp, Bos taurus
  Clone ID: 57-LIB3057-011-Q1-K1-G2
ggtgtctgtgaccccaccatccccccagattttgctcatccttcctgggagcgggggctctggggtcccatctgcactccccgctgagcacccagcctcctcccgtccccctctgggccgtctgtccgtccgtccgtccttccgctgctgtaggactaggtaggcacgtcccccgcatctgtcactggtgtctttccgactcccccagccggaagcaggagcctgggcaccaaagctgtacccccttacaaacccacccttctcggggacaggccttcgaagtccagctcttggattcacttacagttctgtgctttctgctgggacgggactctctgggtagtgtgagcttggggaccaggttagtttcctggtcctattggaacaaattaaaactacatgaattcatc

SEQ ID NO: 2295 - DNA, 208 bp, Bos taurus
  Clone ID: 57-LIB3057-013-Q1-K1-G2
cgaaaagcaatttttattggaaaattttgaaggaaaagggtggttatagtaaaaattcctaaagttgggtttaaaaaaaccccttgttgcacgcaaacgtttggccagaaggcccccaggggccaaaaacggcccctgtaaagggccccgggcagggccggggcaacagcgggagtgaagcttttaaaagggcaagtgctaccggggg

SEQ ID NO: 2296 - DNA, 379 bp, Bos taurus
  Clone ID: 57-LIB3057-015-Q1-K1-G2
cctaaattcaaagggtttaatatgtgcttttcataaactaagagaggaaagaagtttagagatgagttttcttctagattttctttatttctatttcagagtataaccccacaactcaaattaattaggcttgtttatggccatcatttcaaaaggaaaaatcctcccctactaaattctttacccagcattctgcagtaattgcctggacttgattgcaagacagtagcattgatttcagacagtggaatctggtaattgtcctcagctgtcccccaaaataagaacatttttacatgaatacgtgtgcataattgattttttaaccaagaattctttggccctttagtatagtttagatactgttgcaagttcctgt

SEQ ID NO: 2297 - DNA, 375 bp, Bos taurus
  Clone ID: 57-LIB3057-016-Q1-K1-G2
tggaggtctagctcaggctcagttttctcacatcggtgcttctcttcatgctagaactgcttgtgtctacagagtccctgaagaagcgaaaatcatttttttagccttaaacatagcatatggagttcttccccagctcctggcctatcgctgtatctacagacccgaattcttcataaaaacaaaggcagatgaaaaagttgaatgaaaacattgttttatgttctttctctccagatgactgacttttgctatcttggtacccatatctggccccattccactctcttcttgcacaggaacatttgcgaatacatcagttcttgctctatactctgtatcgtaggaattatgtgggtaaatctttttttgaag

SEQ ID NO: 2298 - DNA, 246 bp, Bos taurus
  Clone ID: 57-LIB3057-017-Q1-K1-G2
cggacgcgtggggcggtgtccatggagagaggttgagatggccgacctccagccctagggaccttttcggcaggagggcgagaatgtcggcttcgttagtccgggccactgtccgggctgtgagcaagaggaagctgcagcctcatcgtgccgccctcaccctgacaccttcagcagtaaacaagataaagcaacttcttaaagataagcctgaacatgttggtgtgaaagttggtgtccgaacca

SEQ ID NO: 2299 - DNA, 443 bp, Bos taurus
  Clone ID: 57-LIB3057-020-Q1-K1-G2
aaaagatttgctttaagtgcatggagtatgactacttataaatttatgatctttcagaggagccgaaatctgtttccttccgtaaagctaacttgttttgccttcttatgctttcatttagataagtagagctatctctactaatttgtaaaaagaccaggtctaacaatcactttttagttagaaattgatttaagttaaatttggttttctaacagaaaaccagtgaaaatgggaaaatataatttaatcgtatctctattgactaaatatctgctctggatattttgttttaattttaactgaaacaattaaatgaaactgcatattcattgagtcagaacagcaaaaagattataagtgaagccatacaggttgaaaatccagctttcttcttactgtgttgtcttggtcagcttacttaaattctcaaagttttcatt

SEQ ID NO: 2300 - DNA, 302 bp, Bos taurus
  Clone ID: 57-LIB3057-021-Q1-K1-G2
tagatcgcgagcggccgcccttttttttttttcttctgctaactaggtgtatcatgggcgctatgatcaagattttgtagagtgaacagtcagtacatatgtgatatccttactaatttcctgggataccattaaatatccaagttgctgcagtgctagcccaagcatcatcattgaagatgtgataattaacggtcattctcatgaagatgacagtccatttgcagagtacatgtggatggaaaatgaagaggaatttcacagacaaatagaagtagagttatgggaagatgaatttattg

SEQ ID NO: 2301 - DNA, 416 bp, Bos taurus
  Clone ID: 57-LIB3057-022-Q1-K1-G2
ccctgagcacctaacacatggcatccaatataccaggggttccaaacctgaaggagaggctgtgtttgtctggctgcttataacacatcggctactatgcagttttctgactgctatactactaccaactgctataaagaaggccttaagaatcctgaccagaaacagcagtcataagaaacagtccataacccctggggtcctggggagcagacaatcacggatgaaactggcctgttctcaaggacccacacaggcatttccttccttccttggattccttcaagatccctgtctccccggaagcagctcggtatctcccacatcattttaatgggaagatggagtcttggcccccaaactggtccctgaacacactttgctatggaagcttcgcaggaaaggttggttttggg

SEQ ID NO: 2302 - DNA, 233 bp, Bos taurus
  Clone ID: 57-LIB3057-023-Q1-K1-G2
attaaattgtttttgatattttcttgttgatatcatctgccatactttcaaggcattgtattctgtgagcaactctttaccttggtatgaatatgaatttactttcagtccatatactctacttttctgtactagaattataaattgtttaccataaacatccaaaaaccttaaaattgactcatatgaaatcatcatttttatttaatcctgatgtctggagtcggaccacc

SEQ ID NO: 2303 - DNA, 397 bp, Bos taurus
  Clone ID: 58-LIB3057-004-Q1-K1-G6
cagcgacctgccggagcccgagcgctcgccgcggccggatgctggctctgggggaccgttgctttttgacgatctcccgccagccagcagtggcgattcaggttctcttgacacttcgttatccgaggaggtaaagaatgaagggaaaggagcaaagagaaaagcctctgatgaagagaagaatgggagtgaagagcttgtggaaaagaaagtttgtaaagcctcttcggtgatcttcagcctgaaaggctacgtggctgagcggaagggcgagcgggaagagatgcaggatgcccacgtcatcctgaacgacatcaccgcggagtgccagcccccgtccgctctcgtcacccgggtttcatactttgcttgttttgatggacatggaggaattcga

SEQ ID NO: 2304 - DNA, 201 bp, Bos taurus
  Clone ID: 58-LIB3057-006-Q1-K1-G6
gtccttcgcccgcaggtccttcggtcaggccccatggtagctgacctcatgcctctcggccctggatggtcaggactggttcggggtcagacacactcagacccctggctgactgctagggagacctgaggagcgagggtgagacagctggagtttcagggcagctatacagcaatggcagctcatgagctgaggttggag

SEQ ID NO: 2305 - DNA, 304 bp, Bos taurus
  Clone ID: 58-LIB3057-007-Q1-K1-G6
cactacattacatatgatcctttataataatatcatagtctttaatgataaggatgcgtagtctatcacaaatatttgtaattacaccgaataaaatatacaaacctgacatgtatctataatctctagcattattaaattattactactattcattattgtaaactctaatctcaatatatttcagctgactatcactatctaggattatcacaattcataactaaaatcgactcatacacactcatcaatgtgactgtgctctctttattaaacactataatgatgacctggtcctatttat

SEQ ID NO: 2306 - DNA, 423 bp, Bos taurus
  Clone ID: 58-LIB3057-009-Q1-K1-G10
cggacgcgtgggtgtaattaaaatatttataaaagaaacaactttattcacagagtccagctttgggactggtctttatcttgttttgtaaagtctaacaacactgattataggaagtaaaaatagaaaggaaaacaaatcaccagtaggaaaccctctgagtttgattgaaagctttctgggactctgatgccaggactccaaagtaatccatctcccacctgcctctccccttctgtgtgtcccctgggggaggacatttctgtgtatgtgtcacttccacttcagtttcccatctggtcaaatccatggccactacccccaaaacatcagagtctcagttcaaaatgcagctctggcagttgcagaaggtctggtgggacttggtaaaaagaatttccatcccaaccttccttcccctcc

SEQ ID NO: 2307 - DNA, 436 bp, Bos taurus
  unsure (310): Clone ID: 58-LIB3057-011-Q1-K1-G10
cggacgcgtgggccgctgccgccgctctccggaactcaggcgtagaccgaacgcggcccggcgcgcacggagttaacggcgccgcggcgcgaagagcggagagggcgcgagtcctcgaggcccccgccccgcgccgtccccgcgtcccgcgccccgcgccccgcaccccgcaccgcgggctgacgccggacccgccgcaggaagcggaaggcgggcagccgagcggcgagcactactccgcgccgaggtccgggtgtgtaagcgcagcccgccagagccgagcccagtatccagccctcgaccgcgccgncaactcccagtccccgctccgggtccccagagcagtccaagcaggcgaggggcgggatgttcgcagcttcacaccctgggcgctgagaccaagcctgccggacagtggcattcctttcttgtgaag

SEQ ID NO: 2308 - DNA, 51 bp, Bos taurus
  Clone ID: 58-LIB3057-011-Q1-K1-G6
gagcgatggcactacctgacgtagcgctctgtccgtccccctgtatggcac

SEQ ID NO: 2309 - DNA, 237 bp, Bos taurus
  Clone ID: 58-LIB3057-012-Q1-K1-G10
ccgcgggatacagaacatcgaggaactaagtccacttcactgcaaatttacctaataacaccctctactgaaaattagtaatataacaaagaccatgcgcctaattcaccttctgatacaagaatggttcttaaattccccataaaatggaaaaaacaaaaaacagaaaaacaacatattatctttaagaacacaaaaacactctttataaggcaagagttcccacccatgcttagt

SEQ ID NO: 2310 - DNA, 58 bp, Bos taurus
  Clone ID: 58-LIB3057-013-Q1-K1-G6
gatcccgtcacccacctcggttctaatccaccccccttttttttttttattttttatt

SEQ ID NO: 2311 - DNA, 448 bp, Bos taurus
  Clone ID: 58-LIB3057-017-Q1-K1-G6
cggactcgtgggcagttctagatcgcgagtggccgccttttttgttttttttcctctgggggaggttcttctcacctgtccagcctggcacatcagggaacacttcacccatgacagtgcccttttaacaagttgactttgtttgcagtaaagtctcattgcctcaagatgtcttacatcaagatggacttttcctttccagaaacgggatcaaatatttgctcactcttggtattgggtggactgttgtaatgaggctccagcattgcaaggatggaaggtctgtatagccaatccaaggaggaaactccaagaagagtgaacatactgttcgtttttgccacccttttctgtttgcttattgtaggttgccttactgcgtgtaaagttgttttcagtgcaatgcttgccaaataaatattgtgaactattttgtaaatgaaatgta

SEQ ID NO: 2312 - DNA, 277 bp, Bos taurus
  Clone ID: 58-LIB3057-019-Q1-K1-G10
gtcaaatattattgaagaacaatatactacaaatatctgttgatatttttatgtgctgtggcaatgatgttgtatttttaacgtatttttgtgtttcttctggctcccccccccattaaaatatcaacagatatttgtagtatattgttcttcaataatgctgattactgctcactttcttctttacaaaattgtgtctcagtgaatgtcaaatatttttgtttctttgtagttctactttataattttgctgaaataaatatctttctgttctatt

SEQ ID NO: 2313 - DNA, 355 bp, Bos taurus
  unsure (153)...(154),(163),(165),(191)...(192),(215)...(217),(230)...(232),(249)...(250),(258)...(260),(284)...(285),(292)...(293),(332)...(334): unsure at all n locations; Clone ID: 58-LIB3057-020-Q1-K1-G6
accggtttcggaatgtcccgggtgggacgccacgtcgtctcgtcgaagggggaagaaaaggtgaccgtagaggctcgtctgaactatcctcgtccccggtcgcgagcggggagccgcctcgaggccagcttggccccgtgaccagaagcctcnnagcctgccntnggaagatgccgagacctggtgcagcnnagtcgttcgggccgcccctgctnnngctggccttgctnnngcttcagtgcctccatnnggaagtgnnngtggttggtggccctggagaggcnnagccagnntgtcaggactctcatccacgtgaaagggtaacctgtctnnngcgtgcatttccgggcctgca

SEQ ID NO: 2314 - DNA, 313 bp, Bos taurus
  Clone ID: 58-LIB3057-021-Q1-K1-G6
gagaggctgcgggcgaagcgcgcgtcgagcggtggagcggcgctgcttgtggagatccgcggaggccgaccggattcgttggctgccgtccccgctgccgtgcactgggttaaaaactacatctgacgccaaccatgaaagatccaagtcgcagcagtactagcccaagcatcatcaatgaagatgtgataattaacggtcattctcatgaagatgacaatccatttgcagagtacatgtggatggaaaatgaagaggaattcaacagacaaatagaagaggagttatgggaagaagaatttattgaacgctg

SEQ ID NO: 2315 - DNA, 237 bp, Bos taurus
  Clone ID: 58-LIB3057-023-Q1-K1-G6
gcctgtttagctgccctgctttcgagggcaccttggatagctcgggccgaagtatgtcgcggtgtcccctgtcccttaccctgcagcaccgactctgctaggaggctttaactctgagactagcatggttgtccgacttctgctttggtaatatgacctccacggagtggtctcgctgctgtctagcacagtgactgacagtctggaagttttcagtcatgttttgtggaatcatga

SEQ ID NO: 2316 - DNA, 286 bp, Bos taurus
  unsure (188): Clone ID: 58-LIB3057-024-Q1-K1-G6
acgcgtgcgctaaattaaaaaaaaaaaaatcctgctctttaaatacattaattggcaagtacgcttcagttatttccagattcatgtgggctgcgtttaactccttacaggagtagagggcatggttcgtagttgagagtggtgattttcttcatgagaaaggataggaggaaggaggtctctttttnctaccacccttgtaatatttcttcaaggctgatatttttgttatggcgtctgtttcatggctcttatgactcgtgcttgaaatctcatgttttttgtt

SEQ ID NO: 2317 - DNA, 343 bp, Bos taurus
  Clone ID: 59-LIB3057-002-Q1-K1-G12
tcccgctcgaccacgcgtccacgcaaaccatactgcctacatcaaatttatactggcagagcaataaaaaaatgcattgtataatttcaaagaacaccttaccatcctccagaacaaccaaatacctacacatgtcaaaatcaaagcatacaaactataatcacattagaacaaaaaccacctaataactagcggctatttctgaaacttactcctaaacatcgcgtcccaaaacagattacttcaccaccattaaacctaacttttccaaccatccaaatttaccaaccacactaacacaccaaacatctacaataccttctaccatccaaagccaatctta

SEQ ID NO: 2318 - DNA, 420 bp, Bos taurus
  Clone ID: 59-LIB3057-004-Q1-K1-G12
gagactataaagaagggcattaagttaataaaaattaatatgaataaataaatgttacttttaattgtgaaattacaaataaattatagttaagctcccacattaaacatcttttctcaaaaaacttaaagaatcaaaagtaaatcacaagccattttaaaattatctattacagcaaacagaatatagctatgcaaataaaaaccagtccagtaccctggagtaaagcaaattttgatcaggtcaaactaaaatgagtgaagtccagaagtagacacaaacatttggtcaaatggaaaacatttctggacttctgcctttcagacctgcctgcctcccaagctgttatatggtgatatcaaaaatacttcacatatcacagagataacatgaggatgaaaggcatgtttgaagttcttg

SEQ ID NO: 2319 - DNA, 349 bp, Bos taurus
  Clone ID: 59-LIB3057-004-Q1-K1-G4
gcgagcggccgcccttttttttttttttttttttttttttttcagccatagaagaatggaatgacaactccaaaacacaaacaccaacagtgccaacccccacagatggcggagaccaaccagggtgctcttggtagtgctcgccccagctcccctgacgtcctagcctgtaagtatacgcaaaagttacctgctgttcttgagtaagtgttggggttaggaatgaactcatctgtttgccaaacttgctatataaaagattatactccttataaaatgaaaaaaatgaaagtatagaaaagtaagactggggtcaggcagttccacgcggttcaatggctggactttg

SEQ ID NO: 2320 - DNA, 430 bp, Bos taurus
  unsure (302),(305): unsure at all n locations; Clone ID: 59-LIB3057-007-Q1-K1-G4
cggacgcgtgggttaaaccagagccaccgtgctggcctcctgactctgacgccgctgccgccattcgggctgggagcccctctccacgccggctgttttccttactgacagggcctctctccctgatagagtgcccctccgtgtacaggctcccattattcctaacggtccctcatcagaatcaacctccccttactatcaatgactgccttccaccacctaatccctcaccccgccacacacacactcatcactctgagtgccctgtatggagggaactgaataatcctgacctggtcctnctnccaacctgatccccgcatccctaaattctcacaaccccagctctctgctgccacctttctcctagacaggactttgccaggtgtctgaagaaatctctcctgggagaggatctaaaatatttttc

SEQ ID NO: 2321 - DNA, 457 bp, Bos taurus
  unsure (419): Clone ID: 59-LIB3057-010-Q1-K1-G12
gtgacatactgtatgtttatataacaaggtctgtttttaacactaaatagtttatatcggcatgcgcttatgttttctaataatacagttcatgtgggtgtatgttcagactttgagaatttgatagtatccgtaaccattgaagtgttacgttttcaacggctgtgttcctcccctaccccttcctttttaaagctacttcacaagggttggaagctccctggttcactttttcattcctctcagtgggtagaagaaaggttggttggttgtttccttgttttttttttgccgtttttttatgccgttaaactaaaaatctctgttaaactcttctttcctttgttcacatgactgtttctttatggtgtttggccagtgatgctgtgagtttgggaagatctttgctgaagactctnttcccctgttattcacccattgtcagttttttatgctg

SEQ ID NO: 2322 - DNA, 253 bp, Bos taurus
  Clone ID: 59-LIB3057-017-Q1-K1-G12
cacacccgttctcaccccctctcatactcttttaccaaacagaatccactatccctaagacagctttaatagattaggcgtgctcacatcaacagtaatttgatcatcctcactacataacaatagaaaaccttatcacttacactatacccaactttacaccattcatttaaaaccctattatactctaccaaccttacttaccctctacttaatctgaccaaatacatttaccacactttaagaatacttt

SEQ ID NO: 2323 - DNA, 330 bp, Bos taurus
  Clone ID: 59-LIB3057-019-Q1-K1-G4
gatcgcgagcggccgccctttttttttttgttttttttttgttttttttttttttaatgtaaaggggttaaaaagggagaaaaagcttcactgtttatttagtgagatgaaagggcatagttggaaactggcttttcccacttgagaaacactgatcatctatgacagagtatgcagtagccacttaaactccattcatcttttcttctttagtaacagatccccaaatttcatttagaacattagtgtacttagttaaaagaaaacattttcccaaccttcttggcagctctaataaaacatttgactaggttactgtcaaagaaatgt

SEQ ID NO: 2324 - DNA, 170 bp, Bos taurus
  Clone ID: 59-LIB3057-021-Q1-K1-G12
gttgagcaccaggcgctccacgaacgtgtggttcgcgacgtactaggggacagacgcagatagcgtccgaccctgcggagatgtaccaaaggctatctgaacctgaccacgcccacaacacactgccgacggtccgacctaccgagcaccgatgaacccagtcgacagca

SEQ ID NO: 2325 - DNA, 374 bp, Bos taurus
  Clone ID: 59-LIB3057-022-Q1-K1-G4
gttctagatcgcgagcggccgcccttttttttttttttttttttttttttcaagaccagctactggaagtttattggaccaaaggctgaatacagaaatccaagccataaggagtacatgaggtttggtgcctgcaagccacattcagaaagtgtccagacaaacttcataacctggaaagagtcacctattttttcaatcagaccctggcctggacaaggacatctcttactaccgctgtgtggggcaggggctactcacaggagcacatctgctatttgttacgtggtgctgtgtgactctgcctttgttccctgttccttcctaaacccatgaacctaaagtactagaccccgaaaaaaaagtccctggga

SEQ ID NO: 2326 - DNA, 453 bp, Bos taurus
  Clone ID: 60-LIB3057-003-Q1-K1-G12
tgcaaaccatactggctacatcaaagtggactggcagcgtgtagagaaggacatggagaaggccaaggaacagctgaagatccgcaagagcaaccagatacctacagaggtcaagagcaaagcagaggaggtggtgtcgtttgtgaagaagaacgttctagtgactggtggctttttcggaggctttctgctgggcatggcgtcctagaggggatgacttcaccaccattagtcctagctttgccaaccagcagcctctccccaccaccctaggacagcaaactcctcctcttcctcctccctgccatggcgtatctgagtggctttgtaggcatctggtggttcaagttgggaacggccccactgtgagcttgacagcaattggaaagagcccataaatgttagcgctaatctagcacactcccccgggactaatctgtaagtcagcaagta

SEQ ID NO: 2327 - DNA, 415 bp, Bos taurus
  Clone ID: 60-LIB3057-005-Q1-K1-G8
gggagctcatgtcgccagggatactcgggagtctaggtggtgctttcttctgatcccgccgaccgcgccccgctgtggcctcacggacctactcttctgtttgtaaaggtgaaccaagggaaagaagaaacacggaggttttatgcctgctcagcttgtagagacagaaaagattgtaatttttttcaatgggaagatgaaaagttgtcaagagccagacttgctgcccgggaagcccataaccgaagctgtcagcctcctttatcccgatctcagtgtgtggaaaagtacttgaagtttatcgagttgcccttgtcttagaaaaagttttgtcagaactgtcaacaattgctgctgccggatgatgaggagaagcattatgaacattaagtaatgggtgaatgttctattaccc

SEQ ID NO: 2328 - DNA, 346 bp, Bos taurus
  Clone ID: 60-LIB3057-013-Q1-K1-G8
cggacgcgtgggcggacgcgtggggtattcttggatgatcttgctgctcttatggctcctttgtgtgtgtgtgtggctatgggttttcatttgtaactccatctgcttaggagagtgggctctccacaagggaacctgctgtgaacttctttgcagcaagaatgtagagagaaataggacttattccactaggggctctcatctcacaccttaaggagaggaaggagatttctagaaaaactaggccagattttctttgttctccatcattttaatatggcaaactgtttggctttcctactctgacctatgtaatgttccttaaaaatgtccccaaaaggaaaaa

SEQ ID NO: 2329 - DNA, 407 bp, Bos taurus
  unsure (339): Clone ID: 60-LIB3057-025-Q1-K1-G12
ctgagtgatttacagacccagttaagccacgagatccagagtgacgtcctaaccataggctagctgcagctcacctgtttgagcaaaacagttggatttcaggtctcttctgagactctctttggctcctggggactggacagctgttgctcaagtttcttggcaagccttcagtaccaattagcaaggcagcagcgcgtacgggtaggtccatgccagcctcgatcggttacagatcaccaggggcgccactattgccggcaggacagttttcctcttgatttagcatacctgggccttactgtacgttggcagcaatgctccctgaaacactgcttncaccctgtctgacagtgtgccttgtcggccatagggctcctctgttgacaaccactgagctggactct

SEQ ID NO: 2330 - DNA, 333 bp, Bos taurus
  Clone ID: 61-LIB3057-001-Q1-K1-H2
tcgtggggaccccacaccatacaacccctgggttgcttaccagaaacaaaggcaaacgctttgaagaaacatcaccatactgcacccgatcagattcccagaggaaaaagtgctcctgagggagattgtgtgctataaacttacataacacaagaaatcatctgcagtgagtaagaacacatacaacaaacagaaggaatagaccctgaagaactacacgctagcagcagcaatgtgaaaagactgaacaaatggtctgttttaaaatggttaaagtgataggattttacgattttaggggctgattcagcagacaggagacactggtattct

SEQ ID NO: 2331 - DNA, 438 bp, Bos taurus
  Clone ID: 61-LIB3057-002-Q1-K1-H2
caactattcaacatggaggcggaggtcgataagctggaactgatgttccagaaagctgactctgatctggactacattcagtacaggctggaatatgaaatcaagactaattatcctgattcagcaggcaagaaaaatccagttacacttttaaaggaattgtcagcaataaagtctcgatatcaaactttgcatgttcgatttaaaccaattgctgtggagcagaaagagactaagagccgcatttgtgctactttcaataagactatgaccttgatacaagaactgcaaaaggaaacagacctggagttgttaccactgactgaagaagagaaaactgcagcagagcaattaagagctcacatgtcagacttatgaggaagaaatggacttgccaaaaggaactctaatggggaagaaatcaatcccagaaattta

SEQ ID NO: 2332 - DNA, 420 bp, Bos taurus
  Clone ID: 61-LIB3057-005-Q1-K1-H2
attttttatgcatttgtggaggctcattaaacctttgagctctacatttcatttgcctttactctgaaaacaaattagcatgattgaagactgaatttttccaaagtgagagaaaaacacagtgaaacaaattggtaaattgtggggggttttgttttttatttgagattattaacaaattccttttttttgtaatcacttgggatttgtgtgaacagatggcttgtttagtttattggataaatttccccaaataagctatcaagttggtatttactttgtctacttagaaagatactgtttgttaagtcacacttttgccttcgtgtttgcagtatttttaatgtgtttagtgctgttactgacagttactaatggttaagataattaaattttacataaagttttaaatccaacata

SEQ ID NO: 2333 - DNA, 356 bp, Bos taurus
  Clone ID: 61-LIB3057-007-Q1-K1-H2
cagaaactgtgtggagtgttcgggggatgaggctgaggaggcttgtctttgccttgcggaaccccgctcctgtcctgaggtctccacccaaggtgggaaccccggagagcagcctagcagccacgtgccgccggactcgcgggcaatacagagcctgggaaagccacggcctcggaagttgctctgaagaacgagcaggctcgtcgcgtcgcgtgttgagaagcagcagtggtgtggatcagcaaggttgaggcggcggctgtgcgcgtcacgacagagacgtgagcagaagccgcgtggcgcccaaggagccagcgatgacagcccggcaacgggcggtgcgggggcaggaaggc

SEQ ID NO: 2334 - DNA, 420 bp, Bos taurus
  unsure (390): Clone ID: 61-LIB3057-010-Q1-K1-H10
aaaataaggtatatgtggtggcttaagtatctgtctgcatatcttatttgccataagaagttgacctccataaggccataggcctggtcttgattatgactgcattcccaggatattgagaatttccagaaggtgctcaaaaacaaggattgtatggatagaaacctggtctggctggtagggctgggttttcacacctccactcaattatgtcaaagtctccccactgctttctgcagtgctggcatctgaaatgtgttctggtcacactgcatatagacgatgcacaggcttccccattaggcctaggtgtcctggtaaagcacgagctttatcgcatctccaacaggcctaattcccaaacagtctgagacagcaaagcctttggtnttttggttttttttaaatctgctcaggaaa

SEQ ID NO: 2335 - DNA, 203 bp, Bos taurus
  Clone ID: 61-LIB3057-010-Q1-K1-H2
cgcgtccgggggtttcaaagagttggacacaactgttcgactaacactttctccagggagcgtctggctccttgaagggacagggacttggaagaggcagaaggtgatgagttctggctgtgtaggctcccaggaatcctggaaagggtggagaggtggggtgcggaagctgattggcaaaggctgcctggaggaggatgtga

SEQ ID NO: 2336 - DNA, 358 bp, Bos taurus
  Clone ID: 61-LIB3057-015-Q1-K1-H2
ggagggtgaacgctgcccgggacctggtgcctgataacgctcttttggttacccctgaggggtgtttcgtctgacttggtcccagtcttgtcaccggcccatcatggcatccagtcccactgtgttgatgcggttggtggcttcagcatattctattgctcaaaaggcaggaacgatagtcaggcgtgttatcgccgaaggagacctgggtatcattgagaagacctgtgcaacagacttgcagaccaaggctgaccgattagttcaagtgagcatatgttcttcattggcacggaagttccccaaactaacaattataggggaagaggatctgcctcctgaagacgttgatcaagag

SEQ ID NO: 2337 - DNA, 289 bp, Bos taurus
  Clone ID: 61-LIB3057-020-Q1-K1-H2
ttcccgctcgacccactcatccgtctgtgaaccctcttttttccatttgaaaccaaacaaacaaaatcggttcttgtaaatttaaactatggtctacttatattaatacttaagttacaattaatctttaaccactattttaactctaccaacatccaaactaataattctctaaaattactatctttactcatataccttattaaactttcaaaacaacatctatacttacttcataacatctaatccaataatatactaccaaatttatatactgatttataatatc

SEQ ID NO: 2338 - DNA, 243 bp, Bos taurus
  Clone ID: 61-LIB3057-023-Q1-K1-H2
gccgctgatgtcatccgcatcctcaagaccaacaacccagatattactcaccatctaatgcctgaaggcacttgtgcaggtgtttggaagcgttgagagctccagggatgttcaggtcagatttctgaacacttaccagaacccggtagaaaaattatctgcttatgtcattcgtctggagcccctgctgcataaagtggtggagattggagccatatataaagagaacgtgaaccaagcccg

SEQ ID NO: 2339 - DNA, 172 bp, Bos taurus
  Clone ID: 61-LIB3057-024-Q1-K1-H10
cggaattccgagcagcgcgtacgcgtgcaatcggatgtaactatcaaaaatttcaccattcaagccatctgattttgccccggtccggctattttacagattagcacactggtattcaaggaggttaaacgacttacctaggatcctcaggctgataattggcaatactggg

SEQ ID NO: 2340 - DNA, 132 bp, Bos taurus
  Clone ID: 61-LIB3057-024-Q1-K1-H2
cctcccccgtctgtcccaatgggcctggagtataccatttatcccaacaataccttttacacgctattgtttaaattgtatcattacatccatcacctatttttttaaatttacaactaattttataaactt

SEQ ID NO: 2341 - DNA, 214 bp, Bos taurus
  Clone ID: 62-LIB3057-003-Q1-K1-H10
acgcgtccacgaatggattatcaccatgctctcaactaacgtgctgtgcgtgatcctcgggtgtgatggactctctttatgacctactcaccgacgtacgacgtatgacactagccaccgaagctatgttatcacacgccatatagattcaccaagaaaaccaacgacttactcaaaccatggacatgatattttgacagctaattactggatc

SEQ ID NO: 2342 - DNA, 423 bp, Bos taurus
  Clone ID: 62-LIB3057-004-Q1-K1-H6
gtttttatatagtgttattttaaatgcatgtgttcatttaagttaaataattgagtaggatatataagcattggttattattttatcttcattcctaaaaattttcaaaattctgttttgattttcctcatttgagaaatgtagggctatcttgcagtcaggtctgccttattcttatctatatgtatagtaggtggtagttgaaatacaagaggatttcaatgggcaggagacagggttgaggacagagtctgtacccaccctgagaaaaggagtggaggaaaaggagtctttttagaagactaagagaaatgagaatttaggaagtagaagaaccaggagaaattaatgaggttgatcccaagagaaaagaccgtgtcaaaaataggggattttaataataatactagtagtagtagtaat

SEQ ID NO: 2343 - DNA, 416 bp, Bos taurus
  Clone ID: 62-LIB3057-005-Q1-K1-H10
tgaatttattcaccattttcaacataatcagccatttcagataaagaaaatagtgcccacatattattccactacctttttccttttaatgtccttctgtgagtcactagagtactgtatacttcagcagtatttgtgtaataaataatttagtgccccttataactgtcagcctttagtttcacttttttcctaattttaacaccttctttccagaaatttttaatttgttaagtatattgttaatacgtaataatttatagacttcaaatcttacaagcatgaaatcgcaagtatgagaattaattaaatatgaaatattaaagctaaaaatggttccacagaaagattatggggaccctgggtccctgatggcattgatgaacacctgaaccaacaagagtaattgccagctt

SEQ ID NO: 2344 - DNA, 390 bp, Bos taurus
  unsure (142)...(144),(148),(153): unsure at all n locations; Clone ID: 62-LIB3057-005-Q1-K1-H6
caaataaaaaaggaaatgaaaaaagcagaaaaagaagaacctaaaaaagatcagctaccagaaaccattaaggaagataaacagcaaaactttctatttctacgactttgggacaggaatatggacattgcaatgccttggnnnccanatgtnaagcatcattttccttgtaaagaagtgaaagaaagtggacacatgtttcctagtcatctgttggttactgcaacacatatgtactgtttaagggagattctttcacgaaaaggattggcctatatacagtctcgacaagcactaaattctgtagttaaaataacatccaaaaaaaaacatcctgagctaattaccttcaagtatggaaacaggagcgcttcaggaatagaaatcttg

SEQ ID NO: 2345 - DNA, 440 bp, Bos taurus
  Clone ID: 62-LIB3057-006-Q1-K1-H6
tttgttttttttttgcatgcaggaaaagctttattaagtcatagaactattataatttgttttagacagggatgtagaatactcaaacattttaaatgacctatgaaacaactggcatatatttagtaagcaagatccactttaacaattctctctgctcccaccctcaatgctcaactataggacattcatttatttatcatgtttagtatttctgtctcacagccatctgtcagaccttttgctgcaaaaacgtgttttttaacaattaaatacacaatggggagatatggttagacatttacaggacttgaaatgttgaagaataatacacaataataggatcacatgaagggcagtggtatctttcaattcattttgctatttccagtctctttttcaaacattaatctctaaagtcagtccaagttccatccttg

SEQ ID NO: 2346 - DNA, 389 bp, Bos taurus
  Clone ID: 62-LIB3057-008-Q1-K1-H10
taacaaagaaaaagtaatttgctaaaatagcaatacgacttttgagtagctggttggaaaacaatccaggaggatagctgtaccaaaaaatgagaaggcatgggcattaaacttgccttggcaagagttgaacatctgaagagtagataatatgtcaaaacattgaattttccctcttaaggcaatttaaagagtcttctgtgttgtgtgaatatcttatcttataatttaatcataaaagaagtagcctgactatggtgtttcaacagcctagatttaaatattgttttataagaatacaactttttttttaatagcaagcataactttgataacttgactcaaacattaaaagaaaatatcttgaaataaaccagaaacctctgaac

SEQ ID NO: 2347 - DNA, 207 bp, Bos taurus
  Clone ID: 62-LIB3057-010-Q1-K1-H6
gcgatcgcgagcggaccgccctttataaccttttctccatcacatttttactgtcagaggtacgaagcatctgtatgctttcgaccctttattgtcctttttctttttttttttttttctttaccctacccgtacttttttcaacataaatatatatgttatctttattcatatataataaaaccacatagataccaaatgtgaaat

SEQ ID NO: 2348 - DNA, 376 bp, Bos taurus
  unsure (328): Clone ID: 62-LIB3057-012-Q1-K1-H10
gctctgtcgcatgccggcgtactcacagagtgacccactgaatcgcaaagtgtaagggatgcgaaagctgtcagtgaatctgcttaggacttacaccggtgaacttgtcagtacagactgtctatcctcattctttatcacaaacaatcatccataactatagtcgatggttcacggtcccaactgctgacattgatcattaacatcacattccagcccactgacccttgaatcaaatcctgtaaggaggactataactcgaattgcactgacttccactgttcttactctgatcaacttgctgtaggacccatgagctcatcacatncattcaaagcaaacacacatcacgacaagatatttcaaggcatctcta

SEQ ID NO: 2349 - DNA, 442 bp, Bos taurus
  Clone ID: 62-LIB3057-013-Q1-K1-H10
gcgtttgtgtgttacaatgtaactttggttaaaatctctgtagataatgaaaaacaagaacctttgtgatcatttttcagatgaccaaatttaaaattcaagctatcagagctgaataatgcctcagcaagaaactgagcatttgttgcaataagaaaatgataataataataaaggaaagcttgtgttttatttgggttcttaataattccagtaattgtatgaggcaactatttatgcatccagccagaagcagaaggtttgggaaagactgtgggacctttacttagaaagtgaaatgtatgttgaagcctcgagtaccctttctacagttttactgaagaaaactaaaagccatattcatgatgacctatacaatttggagtttgactttttcatatgtataagttgtgtagaagaagatattcagatgaaaatcata

SEQ ID NO: 2350 - DNA, 444 bp, Bos taurus
  Clone ID: 62-LIB3057-019-Q1-K1-H10
ggccgccctttttttttttttttttcagagcggtcacaactttttattaatgagaaagggttcagccggggagctcctcaatgagagtcctccgggcaggtggcagggggcctccccaaagctgctccagctcccccgtgagggctgccacctcctcggccgccacagtgtgagctcggtgggccgtggcacagtctaaagccaggggtgtgagggcgtcctcattttcgttggtccaagacagaaggaactggcatttctttcgggctcggtagaggcgatctcgttcttcgggggccacagcttgtttccgggcccggcccagggtctgcgccaggtcccccagcgctgccagcgtgtagcttttctggttggccgggccctcacccaccaggatccggccggcctggcgcatggaaccccgtgtgcccagaggtccggggg

SEQ ID NO: 2351 - DNA, 363 bp, Bos taurus
  unsure (302): Clone ID: 62-LIB3057-021-Q1-K1-H6
tttaacctgcttattaaaagggaaaagctttaattgggttctaataagtaaagtatgatagtgatttttataggaatccagtgttttgaagaactggcctattgtgtttatattttgaaaacaaaatggaaaagccacttaaaatagtatgaagtaatctaaattactatgtcagttgccaaatcatttaaatttgtgtattcaccaggtctaaagatagattgtggctgctagaattccagttttaattgaagagctaaataagtcaaatgtacaagtattagatttcttaatgatcatantttgcagttttagaaaaagtgaaatattgttacacatttattaaatacacttcttccatgc

SEQ ID NO: 2352 - DNA, 372 bp, Bos taurus
  Clone ID: 62-LIB3057-022-Q1-K1-H6
agatgactgtttcccttgagttggataaggtggcatttgggatcctggattgtcacggtagcttggcaactccagtggaaatgttactgctttcttttagcgtctgcatgtcactttgggtcacttgattaggctcagtccttggaccagtctctgatggaccagtcccagtaaaaaaccacatggggtgaggggggggggttggctccccaaagataggggtgcttaacagactaaatactgtatgtttatgacacacatggcctgtcctttagtctcccctatttttctttacctgggacctttctcttgacgagcatggtaaaacccattgtaaacctatgtctgtacccttcaatcacaagggtcttg

SEQ ID NO: 2353 - DNA, 374 bp, Bos taurus
  Clone ID: 62-LIB3057-023-Q1-K1-H6
gggtcacttctgacatgttgccagttccagatgacaactcaccacatccacgcctgtggggtttctcacacacaccaagctttccttgtggtgtgcttcacgtgtgcttgttcccttcatttctgatacaccccattccctctgtctggctcagagtcctcaggcgccctggatgggagctccgtggtgcaggatgccttctctctcaggcacacagagcgcattcactgcaagatgaatgcctgcccttctctccttgtctgtctgtgtctcagcagttctctgcgtgacagactgtggttgctcttggaagtttctctttgagggtgtgcattgtctgttgcgtgaaatgcaatggcaccccactccagtac

SEQ ID NO: 2354 - DNA, 417 bp, Bos taurus
  unsure (403): Clone ID: 62-LIB3057-025-Q1-K1-H10
atctcatttaactatcaaaaatctcaccattcaggccatctgattttgccccgctcctgcagttttacagattagcacactggtattcagggaggttaagcgacttacctgggatctcctggctgataattggcagaactgggatgtggaaccagggtccatccccaaaaccgcccttttccaccctactgtgttgtttcctaaattgccaagtgaccttgtgtaagcattctatgtcctgtcccccaatctgggcttcgatttctacatctgcaaagtgagagggattaaatcatgcctgaggtcccctccaggtcccagtgtctctgattaaaagcgtatgttcaggaatggatcctgtttgctgctaaactccgagacacacaaggagcctgagcttggngagctggaggctgg

SEQ ID NO: 2355 - DNA, 196 bp, Bos taurus
  Clone ID: 63-LIB3057-004-Q1-K1-H12
ctttttatattctatttcttttttttaaaaaaacgtttacgttagttatatggatcaaaaccagatttttcatgtttcacaaactatctgctagatatccccaaactgcctaactcactgtggaaggcctcttaaggtttgcattttacttaacaccaactatatacccaacaactttactgctaaaagcaacttc

SEQ ID NO: 2356 - DNA, 122 bp, Bos taurus
  Clone ID: 63-LIB3057-014-Q1-K1-H4
gaatacctgctcctgctctgagggtccagcttcctctcccgctcccgcgcggagcggcggggtgcgttccgagttcggaggagttcgaagtggacgggtgccggggtggggggaggaggggt

SEQ ID NO: 2357 - DNA, 447 bp, Bos taurus
  Clone ID: 63-LIB3057-020-Q1-K1-H4
cggacgcgtgggcgagagttcacagtctgttgaagaagaccgacaaggaaacagaattgagatgcgttgtgaaaaaatgaccacaatgagttcttgacgggtgccgtaagagcacgggggagacacggggtaggaggtctggaaaggctttaagacgacgtctgagtgacacgtgaagagccgatgtaacgaaggaagaatacctaagtaaaggaaacgagatggaaaagtcgaaagacgcggtcgcattgagcacttggggaggttgttctatgccacagggatacaggagttgccgggaagatggtgagaggtaggcagagaactttgtgaatctggttggtgctgtttcaaagtgtggagcaggttttctctgctcacatcaggcctcagctgaaagcttgtctaccacacgcaccggcactcacgtggagtaggaacaggagg

SEQ ID NO: 2358 - DNA, 404 bp, Bos taurus
  Clone ID: 63-LIB3057-023-Q1-K1-H4
cttcaaccaaaatatgtaaatgaagaaatactgtatttaaacatttgcacatttacctgtacctgagacatgtgaatgtcaacacttcatacttcatggatagtagtccttcataaaaacaaatattgttaatcaagttttaaagttactttatttctctttgaatgtttaatgatttaatagctactgttttatgtcattttgtcctcgtatcctgcttttactaaagcatcttaactaataagttgcttaattccacatcaaactgttattattttcttcaggaagttgtatgatacatattgtttccccaaatggaaaggatgaagttctagacatttagttaggtatacaaatgcttacctgttagttttgctacttatactttaaaattaaagccttta

SEQ ID NO: 2359 - DNA, 369 bp, Bos taurus
  Clone ID: 63-LIB3057-024-Q1-K1-H12
attccaagctacgactcacgcgtccgctcgtattttaccatcaccaattttaactttcaagccatctgatttttcccagcttctgcatttttacaaatagcacactcgtattcaaggaggttaaaccacttacctgggatctcctggcttataatttgcaaaacttggattttgaaaccagtgtcaatcccaaaacccgcctttttcaacctactgtgttgtttcctaaatttccaaattaccttgtgtaaacattctatttcctgtcccccaatcttggcttctatttctacatcttcaaaatgaaaaggattaaatcattccttaagtccccttcaagtcccaatgtctcttatataaaacctattt

SEQ ID NO: 2360 - DNA, 410 bp, Bos taurus
  Clone ID: 64-LIB3057-004-Q1-K1-H8
ggtgagacctgcagcttattggggtgatgcaacactctgcagttttacggagtttgggagggacaacattttcagttggattttcattggaaatgtgaagggtgtcctgatcctttctcatgatcatatgcagaaaaataatgatatttgtgagtagggcccacatttaggcttaatctaatattacatttgtgtaactgctgcttctgaaaggcaaaaaggaaagtaatgccaccatttttaagagaattgaatagacctgttgcaagagggttctgacgaatcaatcctggtttacctaaattaaatggccttggcctccatggtaccactgaagttcatataaagctcctggttcacgttttgggatctgtcgaatactgaacttcgtgcaaatggtcgtatttaca

SEQ ID NO: 2361 - DNA, 328 bp, Bos taurus
  Clone ID: 64-LIB3057-005-Q1-K1-H12
cttgtatcaagatatctaagcacattgacacatacacgaacaggctacattgtctgggtatcacaaatcatcgatgagcgtgcgcgatctaaaagataggtacatcctgatttcctagaagatgatatattggactcgtgtatgaatattatcacgaatgctcgttcacatgacagtcagtatatactcagacagtattacctgctttaacatctactcatctatgatgtagtgcttaaggattcgtacagtagcactcttttctaacagatgtacagtgttctgtctcgatgcaatatcttcaatgtcacatgaacgcactgcatac

SEQ ID NO: 2362 - DNA, 307 bp, Bos taurus
  Clone ID: 64-LIB3057-007-Q1-K1-H12
acccacccatccgactgtttataatacctcattttaaaaaatatccattgaatccgatatttcctgttgcggatacttctccctcatggcacgcctttcctgctccccaccacactagtgccctctccacccgacccgcccctgccctctgtttcttcatcagtatttgaaagtgaatgatttgtaaccaagactctatttcttaggatcacatttacaatccacagattcgttctcttggcaacaaacattttttgtatgacctgactaaaaccaatcgcctgactttagttttaaaagtatagtt

SEQ ID NO: 2363 - DNA, 78 bp, Bos taurus
  Clone ID: 64-LIB3057-008-Q1-K1-H12
gctgaagccaacttctgagcccgctcctggaccaccagggaatcatggcggctacgggctaagtgtcatcacagatgg

SEQ ID NO: 2364 - DNA, 460 bp, Bos taurus
  Clone ID: 64-LIB3057-010-Q1-K1-H8
taccggttctcggaattcgaggcacgagtcacgcgacgcgtaggcggacgcgtgggcggacgcgtggggttctagatcgcgagcggccgggctttgtttttttttttttggataatacttctgctataatagactgattgcacatatatagatatgcaggggaaaagggactgcaacatgaagtattgagaacacagctgtgctttaatttaaacgggggtcctatataggaacaggggccacactgatgaagccgagttgtttcactgacctcttaaacaaatacccttgacccaataccccaactgatcccattctgcaaaagagaaaatcgaggctcaaaaaggataaaccactagcccaaagttacacacttcttaatctaaattgccggttagggcagggaaggaaaaccccagggtcagacagtgggaggggggacattcctaaggatattggg

SEQ ID NO: 2365 - DNA, 420 bp, Bos taurus
  Clone ID: 64-LIB3057-011-Q1-K1-H8
ggatttactaagactgaaaagttagtataaaagctaagacaaaagtctagtttaacaggctactcattcagtgctttccccacttcagcacaaggagttttgaaagttttaatacatggcttttgttattcctaaaagtcagctcttgggagaagcattaacaagttggaaatatatactcgcaacgtgagagctctatctgtattatgtggcaaactagctgtatttggatctaataagatcaagaaatgatacaaggaattttcttttccccttcccaaacttttgagtcaccctagtaagtcagagtattaacatgtgctagatcattaagactccttcactcttcctgactgaaagatttttcatatgttccttataataaagaaaataagataatttcaattccaggtatttaag

SEQ ID NO: 2366 - DNA, 346 bp, Bos taurus
  Clone ID: 64-LIB3057-012-Q1-K1-H12
atggcccggggatacttggaaagaattgacccagctgaattggaaaatgtttgaaggggatggggaagaggctgctccgcgtgagatctggctccaggacttacagcaaggggaacttgggccaatttcaaaacggtcaatgcctaaattctttatatcccaaaccgaattattccataaactctaaaggccatggtatcaacgggtccccaaactgactgcacatctgagtcatgttaacaaacacattccaagccccacctgagccctctgaatcagaatccctgtaaggaggacgatgaacttgaatttgcactgactttcccagctgtttcttactctgatc

SEQ ID NO: 2367 - DNA, 295 bp, Bos taurus
  Clone ID: 64-LIB3057-015-Q1-K1-H8
acccactcatgccctgtaacaccatcctccccactttccttctctacattaccatccaaacaccttgcataggttcctttcaatctttaattcaccatacacaatccacttaaccctacaaatatcaccatctttaaaactctaataatatatacttaccttattctataacaattattcttcacacacaattattcataactctaatatccattctattctaaatattaacaccctttttacacatatctttcacatttaatcttatctcattccaattctaaatttcttatct

SEQ ID NO: 2368 - DNA, 440 bp, Bos taurus
  Clone ID: 64-LIB3057-016-Q1-K1-H8
tcggaaagagctgtgcattttaataatgtataccaagatgggcagagaaatgcttgtagagcgactcatcattctggaatcctgaagaacagttcttcttaaccttttgaagatcaccagctttaaaattcgatgaaagtataatagcctttttctagaagaattagtgggcacacacagtgttgcatagctgtaagatccatgggaagccgattagaaacacccatgttacacatagctttcacatgtaaacgtttggcattccaagtataaatttcttctctctgcattattgcaagtgtatagggaattttactgtgttaaactgtgttatatagttctagtttgtgtattctttatgatccatagttctatctcattaggttgtcctttgtatgatattgttgtttttctttttttttctttaatctttttttttt

SEQ ID NO: 2369 - DNA, 387 bp, Bos taurus
  Clone ID: 64-LIB3057-021-Q1-K1-H8
gcggtggcagtttttcacagctttcttcttgctgtgtcgattattaatgtctcagccttttaatgaaatcatctttaaaatgccacctttcagcctcaccctttagtggaaaactgaaaggaagtaacagcgtgggagctccagacttggtcctcattctatttttcacctttctgtccctgtttatagattatataaaaaccttgtggaaatatgagatgtcaaaatgatgcagtaaatgagcagtgacagaatgctgcagagaaaatttactcttgcctagaactggaggatttttatgggtctgtaattttcccacactcattgctgaaagcttaattaagtacttcagaaatgtatctccattgttttaccttctgaggggaa

SEQ ID NO: 2370 - DNA, 148 bp, Bos taurus
  Clone ID: 64-LIB3057-024-Q1-K1-H8
gcggacctggggccgaatcttctctaataagaagctaccgtccgcgggtcgggctctgtgtccggtcggatcggcctggcgctggactgtctggctcccgcgcggcgtgcgatgagccgtccggacccacgctcacgccggtggaggc

SEQ ID NO: 2371 - DNA, 347 bp, Bos taurus
  Clone ID: 01-LIB3058-001-Q1-K1-A1
ttttctttctactatctagcaccaaacttggaatataataaatttcagctaccttaaatccatgccgataggacaaacatattcatgtaataaagaaaaattattaggtattcagtaaatgtttgctgaatgaatactgaccctgagacttcaagactacctaacccttccttatcatcaaacatcattaaccttaaagcatacaagcacgctttcatttcctggagcacttaagtaatttcttttcttgccttcactgtcaacttataactgttagcacttaagcacttaatatgcaggtgaatttaaacttcagtggaaccttattcatattgaaaaaacaattt

SEQ ID NO: 2372 - DNA, 124 bp, Bos taurus
  Clone ID: 01-LIB3058-006-Q1-K1-A1
cttggtcccgctgccatcccctccatcatgaaaatgggaaagcttgccgcattccccactggcccacccctgcccgaccactccctgtcctccagccagagagggctgagcaaaacgcatcggc

SEQ ID NO: 2373 - DNA, 406 bp, Bos taurus
  Clone ID: 01-LIB3058-008-Q1-K1-A1
ataaggtgcattgaccaaaccagggaacacagatctgaccctgaaggcaacccactcacacatggatgcaaaagtatacttgatgttgtatcctgaaacaagccctcagaggccagtgcaaaacccccaaacaaaagtgagttgactctgcttagaggggaagataacaaactagcagaagcttaaaaagggaagtgctttggccaggatggggcaaggaaattatcttacttccagaagtgctactaatgcctcttgctgtctctgagggttaccaccatgggtgccgttttgaggcaaggccagtgttaagcggaagggtacattttcaccaagcaggtggcgtcagggacctgcagcttggcagagataagaatccagagatgtcacagctgtgctttggggc

SEQ ID NO: 2374 - DNA, 325 bp, Bos taurus
  Clone ID: 01-LIB3058-010-Q1-K1-A1
atcgcgagcggccgccctttttttttccttctccaatgtatgaaagtaaaaagtgaaagggagtcgcgtccgactctagtgaccccatggattgcagcctaccaggctcctccatccatgtgtacataaaagaagacttgtcaaatagaaatacctcctcagcgtgtggacaagaattctcaattctctgaagagacaaatactttctcaatcaaatcttattgaaaatactaattaggtacttacactatactaccttattggaattctatattatttattctatttttaaactttacaatatagcattcattttgccacatat

SEQ ID NO: 2375 - DNA, 297 bp, Bos taurus
  Clone ID: 01-LIB3058-011-Q1-K1-A1
gcgggggccggggccaaggccccggctgctcccgccgcgcccccgcgcgtcccccgcgccatgccgacctctgcgctgctctgcacactttgcttctgcctcttggccgcggccgctcgcgccggctactcggaggaccgctgcagctggaggggcagcggcctgacccaggagcccggcagcgtgggacagctcgccctggcctgtgcggacggcaagatcgagtggctgtacccggccggggcgctgcgcctcaccctgggcggctctgagcccagcgcgcaggccggcatcgtc

SEQ ID NO: 2376 - DNA, 266 bp, Bos taurus
  Clone ID: 01-LIB3058-014-Q1-K1-A1
gaccaatagctactgtgtgtgcagttatagatggaaagaaaaaaagcactagtgtgctaccaaaaacaaacaaagtaaaaacacagagggaagaaattcgtggagaacccaatgaacagtataaaatttcagagaatgctagttcagatgaagttaacaagatccatcaaacaatagagggctatttctgccagtgctgtaagtggtactggggcgcttgactgatctgagttgaaaaatgaaatgagaatgattcgaatttctgg

SEQ ID NO: 2377 - DNA, 426 bp, Bos taurus
  Clone ID: 01-LIB3058-015-Q1-K1-A1
gatgtagccgggcttgttccagcccattctgccgtagtagatgatggtgccgtcttccagggtttcgaacagccctctcggtcccaagttcatgtcccatctcgatggacaattcgtccgcacggtcgtggcacgactatcttccccgcccgccgacccgcgccttgatcttggcaaacaggaaggcgaaatttactgcccacgccgcaaacgcgacgatgacgaccgaccatatcaaggccgggctcaatcgggatgcgccatcaagcttggaaaatgccagggcggcgacagcgggcagcagaaagatgttaggcacgatcaaggcataagacatgcttctgccgatcaacatcaccctcttactgaaccggggccgtggatatagcgaaaaccgcagtgtcttgatgagcctgttgtgccgaa

SEQ ID NO: 2378 - DNA, 262 bp, Bos taurus
  Clone ID: 01-LIB3058-016-Q1-K1-A1
gaaagagggagctagacaaactgacttgaacctcattatctatggctgcaccagatcctactagcgcatccttggtctatctatccctttgtggacatataagactagtgctctcaacctctctactcggcgcattaacagcacgaagtcacaacgtacggctgcactgagcctgccgttgtagtcatgcatagtgcccgatcgttacaatcttagacggaaatgtacacaggggatgccacatgtccactgactatgagca

SEQ ID NO: 2379 - DNA, 180 bp, Bos taurus
  Clone ID: 01-LIB3058-017-Q1-K1-A1
gcaggggctcacaggcctggatggacatggtttgtgttcccgcagcctgtaggcaggaaagcttggggcagacactttcaccctgagtacctgttctgctgttcacagggagactagtgggcatgagatgatcagtgcccacaagtggagctctgaagcccacttcagggtacccatctc

SEQ ID NO: 2380 - DNA, 361 bp, Bos taurus
  Clone ID: 01-LIB3058-018-Q1-K1-A1
gtgtgtacagtatatatatacatatatattctgcacacacaacacaatcacagagtgggaaaaaggagcgcatagaggctcgacacagaaagcagcgcggtgagggagatgttagggcccgctcgagccccatatattacacagacatctcaagtgtacacacctgcatagaacgactctgtggggcccatggagactctccacacgcagatataagagtgtgctcttggggccccacacggtgagggagcgctcctttagactctgagaagcggccaaatgttaaaagcgcgcgcgctataggagcctcacgtttacatgcgtgtacgcgacaacgtataccttctttatagggacccct

SEQ ID NO: 2381 - DNA, 468 bp, Bos taurus
  Clone ID: 01-LIB3058-019-Q1-K1-A1
gcttagttgtaagccagcaatcttctctgactgcagcatttctctaattgttaaacagtgtaaaataaaaatcagtccagagttctttccttggctttcttcttgatcggtatagacaggactatatataatcagagaatcacattatttttgaaaatggaactcaagagaatgaatcaagactttgaattgtatttgtatttactgtccagtaaggacctggctacactttcagaaatcagggtctcctaggtcactgttcacagaagttactattgaaatactcctcataggagattgggtgtgagaacatagttcaaaatgtcagcctgtaatttctttgaagctatatgttttatcttgaaaactaatctgattttgcttatgaatatattcaatagaactttttaagattagaaaaatgttaaacttctttccaaatctttgggtaaaattgacactctggga

SEQ ID NO: 2382 - DNA, 290 bp, Bos taurus
  Clone ID: 01-LIB3058-020-Q1-K1-A1
acgccaagtgctgtatgcaggtcgaggcatgaaagaagacacacattacacttagacaaaaagttgtgcaagatttcatacatttctagtgtttgatataaatatgtaaaacattcaaattggataaatctgaactgaaaaggttgatacttttaaatcaattgccagaactaggaaatgtctaatactggccccacaactatggcggtattgcaataaggataacaccctaatttaaatgactatggaatctataaactcaagatctacaaccttgaaaaaacaattga

SEQ ID NO: 2383 - DNA, 314 bp, Bos taurus
  Clone ID: 01-LIB3058-021-Q1-K1-A1
gtcccccgccctcccagtgagggacctcaggatgagaagagggtcgtagacagggcctgtctcccctccaggggtgaccccgtgcagaagcactggcccgtcctcaggcatcttggaccggagtccaacaaaaggtcagcaacttactattaaaacagttgtttcagatcatattgatctctttcccttttccttttgtccttacactgtatgacttgaatcagttttgattctatttgttagtttttctcgtcgttaggaacctgccacttctgttgcgttctctcgggcagtgcacagtttcaactcattag

SEQ ID NO: 2384 - DNA, 389 bp, Bos taurus
  Clone ID: 01-LIB3058-021-Q1-K1-A9
aacaaatgaataaatgagcaagtctcatatcagggaagatgctagtttaatgagctgagtcctgggctgaatataaatatcttccaaccatcacttttctgttctcaggctgccctcctggggcaggagcacagcgcacatatctgggcggtctaggacaccatagtgaagttgtgatgtcttccagagggagaagggcaagaaatatgccctctgcagggactcttctgccaataatccttagttctcgtctgcagaggacactggaagctaaaaccaccgaataatacaatataggtcatggcacagccgtccttcagttcagcagcaatatcctctggtgacatactggttgtgttaaaatacgatgaatggaaagaacagtgcta

SEQ ID NO: 2385 - DNA, 156 bp, Bos taurus
  Clone ID: 01-LIB3058-022-Q1-K1-A1
cttactggcaagctgcattatcaccatatgactgtattactgatgagtgaatcctgcccagttagcgtggatccatagcatctgtgctgaatctagccgcatatggtcccaagaccggacaactgtggtgttgaagagtatccctaccttgctgat

SEQ ID NO: 2386 - DNA, 173 bp, Bos taurus
  Clone ID: 01-LIB3058-024-Q1-K1-A1
gacccactcgtccgctgggccccagccgcacctcctgaggtctttctgcgtttcatccattcttctgtactgtgtcttccctctcaattgccgccttccatcctatctagtcttcctgtagtcccagccccatgtgatgacctctttgacaagagcttggctacaggccatcc

SEQ ID NO: 2387 - DNA, 374 bp, Bos taurus
  Clone ID: 01-LIB3058-025-Q1-K1-A1
gtgaatgatgacacggaacgaccctaaggttttggagcagccagtagtcgtgcagagcgtgggcaccgatgggcgtgtcttccagttcctggtgctgcagctgaacaccacagatctggcctccgaggagggcatcaagaatctagtctgggtggactccgatcagctcctctatcagcacttctggtgtctcccagtgatcaaaaagaaggtggttgtggaacctgttgggccgactggtttccagccagagacattcaggaagtttttagctctgtatttgcacggtgctgtgtgagccaaggactcttctaaggccagagccgtctgggcccctctcttcctgaggatcctggagcctgtatggtgcctta

SEQ ID NO: 2388 - DNA, 391 bp, Bos taurus
  Clone ID: 01-LIB3058-026-Q1-K1-A1
aaaatggtttgtgtcaccattactgtagtactctgtctgtttatatgctcacagattgttttctaactccctttggcagaatatttaaccaatttttggccttaagctgactgccatgacacatttatataatctacaactatactacaaactttgatgagccattcttttgaaaccctccactatacaatgcacagtaaattcctaataagggtttctatactgaaggatcagaactacttgtttgaccacattaatatttactgttaaagaaactaagaaaaatgttcaaggaacacattttattgactgtagttagaatttcactttatactacacttactgttttgatttaacatattggatttaaaatcttttttgaatacagact

SEQ ID NO: 2389 - DNA, 255 bp, Bos taurus
  unsure (9),(35): unsure at all n locations; Clone ID: 01-LIB3058-028-Q1-K1-A1
ccacgcgtncgcggacgcgtgggcaaaaacacttncaaatatagtttcatcaccaagtggaaacctttgtaaaatgtgtaaactggagagacagcaattgagttattttaaaacactcatattggaaaaaaggctaccttatgttgctacctatagccttagccatcctagtttatctgaaatagattataagattccagacttttgatttgggatttttggactttaatagatactggaatgcgttgaaaatat

SEQ ID NO: 2390 - DNA, 393 bp, Bos taurus
  Clone ID: 01-LIB3058-034-Q1-K1-A9
gccatgtgacacacagttgggcgagtatttttggttctgaagcctgggtttctgtgtgtggatttccaccttggaagtcggggggaaccatgagcctggaatgtgggatgaaaggtttgaatctgacaaagggcagaggacttcacagggcagatgtgtctgggggcagggcagtgacccgccaggtaagagtccagcttcctggagcacagcccctgctctgacccacatgcatcgtcaggattcacccttctcccttgggctgtgtgtgtgctgaaaaacctgtattgcatgtgttgttacaagtttctgtgatacttgcagtatattcgggaggagattaagtctgttttctcacctcatttacttcttgattaatgaacacttgacggt

SEQ ID NO: 2391 - DNA, 98 bp, Bos taurus
  Clone ID: 01-LIB3058-035-Q1-K1-A1
cggcagcagctgcagcgcctcttggctttgtagctcttctaactatcggcctttcgcttgccggaaccttggcctccgggggggttgcttttaatggg

SEQ ID NO: 2392 - DNA, 403 bp, Bos taurus
  Clone ID: 01-LIB3058-036-Q1-K1-A1
ccgacccactcgttcgccggcacctgcacgttctcccctggaattggggctgggcacacaggagggggcagatggagaaagacttgaaccgagaaggactctgggcaatgaggggcaagtatccagtcactggccaaccttgggagctgcgtgtgcggcagtgctttctggaactggtgggtaagagctgcaaggtgctgtaatgtggtggcacaagggtccccagagacccctttgcctgagcttggcacccttggctgtcctgggagccttcagtcattgcgcttggctggagaggtcacggggtgtggtttggccagagtctttaggagagtgggccattttcaccgggatcgtgagcaaactgctgtggtctaaagggctgtgagcagcatggccaccc

SEQ ID NO: 2393 - DNA, 220 bp, Bos taurus
  unsure (52),(61),(72),(76),(82),(84),(104),(114),(141),(147),(151),(189): unsure at all n locations; Clone ID: 01-LIB3058-039-Q1-K1-A1
cagagagcaaacgcgagcagcgaaggttcaggacgacagagccagggaggcngacgcggcnggaagggccanggangacacncngaggcaaggccacagccagngggggaagangaccacacggaccagaagcacaggacnccaganggcnagaaaccagaagggcaaaaagccagaaaagcccgcagngaaaacggagccaccaacccaagaccacgca

SEQ ID NO: 2394 - DNA, 359 bp, Bos taurus
  unsure (26),(35)...(36),(73): unsure at all n locations; Clone ID: 01-LIB3058-042-Q1-K1-A1
cggacgcgtgggttagatcgcgcggnctacctttnnttatttttttcttatcctctcatgattggaagtaagnttaatagagattgtagtaaacccagacggaatatttagaatttgaagggggataaagagacatgtttgagggggaaattgactaatactgaattagggcttgagcgtgacttgttagacatgggtacttcgtttttaccttttggttccctttttaaaatgtgattggtaacctggtctttaaaaagaagagactaaatctggtggtggttttaaaaaggttggtggaaggaattttaaaaggaattttaacttctggggactggaactggtccctgggggctggg

SEQ ID NO: 2395 - DNA, 438 bp, Bos taurus
  Clone ID: 01-LIB3058-045-Q1-K1-A1
gaccagctggttttgaaggtcactcttttagtgctaagagttcacgtttctatgcagcggacatctatctgctgagagctggttctatttaactttcacctgattgggcatcctggaatcctagaacttaagatttttaagacaaagatttcaccagttctcttctcccctcctagactacagtcgccacagaactgaagccgatgcctgggtttctgctactctgaccctttaagagctcatcctgcttcagttcccctgacagatagattgttctttctctaaggcagccattccagcattaaaaagttcatccttaaatggagcaaaaaccagaccacagtcaaagtctgattagctgtacttcagagctcatctctcggagagggcgatggcaccccactccagtactcttgcctggagaatcccatggacaga

SEQ ID NO: 2396 - DNA, 155 bp, Bos taurus
  Clone ID: 01-LIB3058-047-Q1-K1-A1
gtgcatgttgctggttttgatagtcacttttaatgaacgtaggaagcttggactaatggcacttttcttcattcaaacatcttaaaatgaaagtacagcactgccattttaaatgtgtttaattcagtcaataaattttgttgcttctttacatt

SEQ ID NO: 2397 - DNA, 426 bp, Bos taurus
  Clone ID: 01-LIB3058-048-Q1-K1-A1
gtgaggaaattagagctgaaagaaagatctgtgattacagctagtcagggtgaggctaaggttcagactcacagcttatacttcttggttagggccttaggggtcatttagtcaaactcttgagttttacaaatgacacaacagtaacgacaggtaagctgacttgcccaggaacacacactttgttaatagcagagacaggacaaggactcgtgtcccaagagtgcctgcccactgcaccagcctgcagtcggctaagaagtaggcctagtcctacatgtccactgtcggccggtggccccgctaacaggcggtgctctcctgctgtgctgttaaccactgggagagaagtgttaggctgggatcggccacagcgctcatcacagccctggtttgctagtgtgctgatggtgcttgtacactggc

SEQ ID NO: 2398 - DNA, 409 bp, Bos taurus
  Clone ID: 01-LIB3058-051-Q1-K1-A1
ggaaaagaagcttgttattatgcactaaagtaaataatttgtgtttttagagtaggagttggatttgaaggcaagagaacttatcaaggatccaggatcttccccaaagctctctccaagtgggactcgactgtacattatgacagacgtaccagtgacattcagtcaggtggagtgtaatggggatacaccccctgaaaacggtcaacagaagattactaaaatcacagaaggagccagtgacgtggatggcaccccaccacactgcagggtagaacctagactggatgtacccacagaaagaaatcaggagaaaagtgaaaaattgcaagaggacatactgctcagctcgtccatggatgagaagattctgaaagataaaccagaagagaagctctatgttgttcat

SEQ ID NO: 2399 - DNA, 264 bp, Bos taurus
  Clone ID: 01-LIB3058-051-Q1-K1-A9
attgaaataaagtaatacacttttaatactcaagaacagtgcatactttccttgagacccgtggttacagctgttactgttgggtgtggccactaatggacggcacttaggcacaaccagctcactcacgccatgtgactgtcgagcgtttaggatcacaatgaacaatattctacgacgacgaccagacgtgcttctactaattgattgatgcacgttcgatatgtcgcttctgtttactttaatgtctcttaagacatatcc

SEQ ID NO: 2400 - DNA, 401 bp, Bos taurus
  Clone ID: 01-LIB3058-052-Q1-K1-A1
cggacgcgtgggtctagatcgcgagcttccgccctttttttttttttttttttttttgtttttccaggtgtggatttttattttcacaaagagacaacaatgccttcccacatacaagtatttacaaaacccaactgattcaccaatctagaacctgggtttttgttttttgtttttccacttctcaacatagttgggaatatggaaacattaataccaacacaattcccagagatggaatttatccatcaaacagtgcagattacctaaaagtgcacttacctgcacaactcagtctaagaacctcagtgatacaaatctcatggccaaggttttattaatctatttggtttcataccatgcaaaccttgacaagggtgctgctacactaaactgaaaat

SEQ ID NO: 2401 - DNA, 410 bp, Bos taurus
  Clone ID: 01-LIB3058-057-Q1-K1-A1
tgcccagtggcatcccccaatcctggttctccggcactacatcctgaaacctcaccatgcccccatcagagatgcaaaaaaaaaaaaaaaaagacttagccaactagaaatccttgggacctctccagctgggacctcagagacctttctgtccttcactcccagcaatgtccatcttacaggtgggaacactgagacacgggggcagaggggagacagcccagagttgccccaactctgctgctcaggcagagagggaggggaactcactgtggagctgctctacatcatgacccctgctgtctcctgaacatcctttcctaataattgtcaaggaccaaagtcattttcgctgacacgtgttgcttttctctttgcctttttttttttaaagagacaaatcaagttga

SEQ ID NO: 2402 - DNA, 349 bp, Bos taurus
  Clone ID: 02-LIB3058-001-Q1-K1-A5
ctttctttctactatctagcaccaaacttggaatataataaatttcagctaccttaaatccatgccgataggacaaacatattcatgtaataaagaaaaattattaggtattcagtaaatgtttgctgaatgaatactgaccctgagactccaagactacctaacccttccttatcatcaaacatcattaaccttaaagcatacaagcacgctttcatttcctggagcacttaagtaatttcttttcttgcctccactgtcaactaataactgtcagcacttaagcacttaatatgcagctgaatttaaacttcagtgaaccttattcatattgcaaaaaacattttgt

SEQ ID NO: 2403 - DNA, 320 bp, Bos taurus
  Clone ID: 02-LIB3058-001-Q1-K1-A9
gacagtgttcattctcctagctttttcagcggagtcctcgctgggagggggcagaccctaggggctctgaggtggacgggggtgaggctgcttttcgggactggcaccctttccacgacacagattttcttgctaccttcgccttggaaactgtgacgaggttccctgctctaatctgttcatcaccttttcagaaaactgaaagaggctcgagacttgctctatctttggtttagattcaactattggattgttaatcgatatgggccttttgcaagtgcgtagcttttttaaagaaagtaagctgagctaagggcact

SEQ ID NO: 2404 - DNA, 420 bp, Bos taurus
  Clone ID: 02-LIB3058-003-Q1-K1-A5
tctagatcgcgagcggccgccctttttttttttttttttttttttttttttttttgctgagacacagagtttattggtatcattcagtacaactttagtcctgcctttcccaaccccaggcatgttgacagtcctttaaaaatcaggctacattattttggaggaaaatacgtccacttaacatgtttaaagaaatgctagaaaattttattcctatcaaaaaaaatttttttatttaccccctcagctacttgacttctaacagactgcatgttgatctaaagtccatgtgacttcgcaccaaccaggtactaacttcctaaagggatgtctttgcagataccaaatcacacagtcctgagctatgcagaaaggcctaagggaagccaacatgtcccaaattttctcccttttgggagc

SEQ ID NO: 2405 - DNA, 437 bp, Bos taurus
  unsure (392): Clone ID: 02-LIB3058-003-Q1-K1-A9
gttttgctgtgtaaatcctagctgctttgtgactcacatatgccctttccccagtgcacgatgagttcaggacagcagcggtggaaggccctttcgtcacccccgacatggaagactgtggctacaacatcccccagacggatgagtcgaccctcatgaccatagcctacgtcatggctgccatctgcgcgctcttcatgctgcccctctgcctgatggtgtgccagtggcgctgcctccgctgcctgcggcaccagcacgacgactttgctgatgacatctccctgctgaagtgaggaggcgtgcgggcaggagagagagatccccccgaaccacagctggtggttcactctggtcaccaggaggagacacggacggcacctgtggccggngcacctcaagagcctcgcccacccataaatgcctctgtcttgaca

SEQ ID NO: 2406 - DNA, 211 bp, Bos taurus
  Clone ID: 02-LIB3058-006-Q1-K1-A5
acgagatcgcgagcgggcgcccatttattttttatttttatcaagttctttattctttttaggtggcaaatatattgttatgaagaaccaaagaaaatatacataattgtaacatatgtacaccagatttataaaatttaattcaaaattacacaatgttgatatgttattaaaagattttttgttgtgcacctatgaccctttatttaca

SEQ ID NO: 2407 - DNA, 96 bp, Bos taurus
  Clone ID: 02-LIB3058-007-Q1-K1-A5
gtgccttgtgattgctgctgctttaaaagatacagtactctgggggatgaatctgttctgttttgttttttaattaaataaacctacactcctgat

SEQ ID NO: 2408 - DNA, 331 bp, Bos taurus
  Clone ID: 02-LIB3058-008-Q1-K1-A5
gatattttaatgaaattgtgatgtacatcataaattgtgatgtactctttgattttctatgtcatgttttatagatggtggttccaaatactcatgtctggagtaagtttgaactataaactataacttatcagatgatggaatgccctaagcgggcttcatagaatgctcttgtatctatttgtcatttgtgttatattcgatttttttccccattttaattatatttctgccagtggttcttttttttctttaataaacttcatccccagcacactctgtacaaatattatgtattcagtattcaaataaaagacctgttttaagcctg

SEQ ID NO: 2409 - DNA, 428 bp, Bos taurus
  Clone ID: 02-LIB3058-008-Q1-K1-A9
gatgtagccgggcttgttccagcccattctgccgtagtagatgatggtgccgtcttccagggtttcgaacagccctctcggtcccaagttcatgtcccatctcgatggacaattcgtccgcacggtcgtggcacgactatctcccccgcccgccgacccgcgccttgatcttggcaaacaggaaggcgaaatttactgcccacgccgcaaacgcgacgatgacgaccgaccatatcaaggccgggctcaatcgggatgcgccatcaagcttggaaaatgccagggcggcgacagcgggcagcagaaagatgttaggcacgatcaaggcataagacatgcttctgccgatcaacatcaccctcttactgaaccggggccgtggatatagcgaaaccggcagtgtcttgatgagcctgttgtgccgaaca

SEQ ID NO: 2410 - DNA, 318 bp, Bos taurus
  Clone ID: 02-LIB3058-011-Q1-K1-A5
cgtttctcagagccacgcctccgcgccgccagcaccgtgccttctgcacgtcctgttgtaactcctgcagagccccgtttcctccccaagatctccgatgggcgggcaggtgagctcgcccggctccttcagcggcctgccctacgcccccaaggcgaacgcggactggatgtcggcgctgaactctcagctctgggacgtgccgctgcaccagctctccatcccagggagccatgacacgatgacctactgcctgaataagaagtcacccatctccagcaaggagccgaagctgctgcaccttctgtgcaaagtgct

SEQ ID NO: 2411 - DNA, 225 bp, Bos taurus
  Clone ID: 02-LIB3058-011-Q1-K1-A9
gctagacgcgagcggcgcccttttttttattttattgtttttttttttttggttggttttttttatgtgggttttttacttttattatttcaagggagccaatggctctacagtaaaacaccggggctttcttctgaaacccgtgtacctgcatatgaacctcaaaagaacaacgtcacagaggaacaagaacgtgctctaaaaggtaggccaatagctcatgga

SEQ ID NO: 2412 - DNA, 368 bp, Bos taurus
  Clone ID: 02-LIB3058-012-Q1-K1-A5
ggggaagtgtcaaagcattgatcatgagtagtctgattgtctaaactgcaatctaattgtctgttcacagagaccctacgttgtaaatattggcaaagggagaaaaataactgttaaattggaagttatcctttagcagaaatcagttcctttggcatgcattttatttatttggcctgcttaatatgtctgtaaataactgaatataaaacaaattcagtgcagcagagctggtgcttctgacacagctaacttgaccatattcctttatcttcactttagcatgagttgttttaactattaaggtagtgcaataaaaaaaaaaaattaaaggtatggttttttaaaaaattactggacctttaaaa

SEQ ID NO: 2413 - DNA, 211 bp, Bos taurus
  Clone ID: 02-LIB3058-014-Q1-K1-A5
ggacaggagccggcggcctagaagtgttctgggagggccccctgaggctggacaggagaacgtcttacatgccccagagcccctgaggaaggtctgccctgcttctctaatgcctgctactctacaatggctatacttgatgtgcatgcacttgtaatgagtcatcctgttctaaagcaagtaaggtcttcaacgcaaatgtatctatttc

SEQ ID NO: 2414 - DNA, 339 bp, Bos taurus
  Clone ID: 02-LIB3058-017-Q1-K1-A9
cggacgcgtgggtcttgaagcgggtgcgggccctgctgagaccaggctccccgcactcacagcttcagtaccaaagagctggttccctccccgcaggccagcccacctgggcctggagcagcgcctggtggcctggcccccacttcaggcttggtgggcagggccaccctggcctgtctctgggggctgctttctcctggccctctggtgggagctgagcagaggggtgaaggagctgtggggtacagcttgagcccaagttctagtggccaaggcagctctcccaaggccagggcttccctggtccacacccagggcatggtgctggccggagacgac

SEQ ID NO: 2415 - DNA, 193 bp, Bos taurus
  Clone ID: 02-LIB3058-019-Q1-K1-A5
acggcgagcggtcagccctttgttatgggttgggtagatatacaagcattaaatgacgtaacatctgtttgacaaatgagggccaaattgacaggaacaagtaataccactgagcggcaacactgagctaccaagcagcatgggatgtccaggctccggaggaaagcaggactagagccatggaccacgagct

SEQ ID NO: 2416 - DNA, 311 bp, Bos taurus
  Clone ID: 02-LIB3058-020-Q1-K1-A5
gcggtgatggacagtccgtgggatctctttacggcctctggactgtaggccgagccccgcgcccggcgtctccgcccggggtgctctccgcagtttcctggcttggaagcctcgggaacatggcgaggcagcggtggtttaacgggaaggacggtgactgttagcctgtgaaccaaagcgagagtgagccggctaaagcttcggaccaagagtgatcttgaacttgtggctgctactagatttttgcccacaccttctcgtatgctgcggattcttcactggagtggggccagggtgaccgtggacttgcc

SEQ ID NO: 2417 - DNA, 169 bp, Bos taurus
  Clone ID: 02-LIB3058-022-Q1-K1-A9
atgacctgagccccttaccatatacacctagcatgcttaaccagtgtacaagatgtgttagacggtcatttaccatatatagtgtgtacttactcattatcatgaccaatgtttactgtatctgctactatgcactatttcactttgtacgaataataagtactgatga

SEQ ID NO: 2418 - DNA, 138 bp, Bos taurus
  Clone ID: 02-LIB3058-028-Q1-K1-A5
cacgcgtccggcacattcatccaccttcagctatcttttcaaagaatcgcccatatttgaagtatggtgctattatcagggacggtcatcttcacagagtaccaccttcaacaactaaaatatttctgttacgtacat

SEQ ID NO: 2419 - DNA, 380 bp, Bos taurus
  Clone ID: 02-LIB3058-028-Q1-K1-A9
cacgcgtccggttctagatcgcgagcggccgccctttttttttgttttttgtaaaaggttggtttaaggtcccagcacttggaggaaaaaaaactccagccagatggaacaagaaccacgatagccctgccccaaccccaagttccagtctacatgcctcccacaccaagcccccggcagccacgaccagggaccagctcacagcaggggagggagacaccactgctccccttatgactccaggccaggctggaagggatttgcataagaagatagcagaagcccaacctgcaacaggactgcggccgctgaggtcaccgagctgaccatgaagataccatcggtcactcggttggatttcaagacagaagccaagaaag

SEQ ID NO: 2420 - DNA, 111 bp, Bos taurus
  Clone ID: 02-LIB3058-030-Q1-K1-A5
gacccacgcgttcgtagaaattaaatattttctttttattataaatgtattcagtataattgggggctaatgagtgtacaatattgtattggttttgccatacatcaacat

SEQ ID NO: 2421 - DNA, 381 bp, Bos taurus
  Clone ID: 02-LIB3058-032-Q1-K1-A5
ctcttttgaaacctaaaaataagaaaatagaacaactcaagttcaaagagtgaagcagacacttttaacattttttactgtttggtgaaggtgatgttttaagttcattgtccctgaaattatacgatttttgttccactctctaaattgtcatctcagattttgatgcttcaaataataccaacattaccagtaaatcaatggctctagcaagtgggggaattggcagatgaaacaaatggtgagaggtggtagctacacccatattatatctgtttcattagataacattttttttttgtattggttaatttattatatattattttctttattccttattgttttgaattgtttcttttttttttttaatatcttttt

SEQ ID NO: 2422 - DNA, 402 bp, Bos taurus
  Clone ID: 02-LIB3058-035-Q1-K1-A5
cctgaacttgaagaaatttgggattgaaaaagagaatttttaatttgtaccaatatgagagatcagtagtccgtataagttttcaacaaagcttgttccaagttgttctcaatttggggaatcattttggtgtcatctagcaagagagtagaaatcagcagatataaccactttggaagtttatagtataactgagcttgttagaagaattcagcaggttacaaacatacttaaactgggtttaaaacctcataatcatttctctaattgcccttaatattttgacatagggatacataaatttaaagactatttctgctcagtttttcggatattgccatactgaacctcattctaaactggtgctgtgggtagtgtccctctgcccttcctgtttagttt

SEQ ID NO: 2423 - DNA, 425 bp, Bos taurus
  Clone ID: 02-LIB3058-037-Q1-K1-A5
cgacccacgcgtccgctggattgtactggatgagttctgaagtaagtgttaagtgtggtgcctgactgcagcagtgcctcattcttgctctgcggccaccgacaggagcgccagagcattccctgtggcagtgctctgggcggtgttgatcggagtgaggcatttggggaactctaagggaaacctgtcgtatattagagcccagagctggtccttgccctagaaactgttacaagctttgccggttacattttggacctttgtgataattgataatctgtataacagagtgcttctctgttacttctgacttatgttgctagaaataagagtataccttgcatatttagaatgagttgctgtccatctctgcactaaacaattcagactgttataagctcttacgtcctgcacagacacgttgc

SEQ ID NO: 2424 - DNA, 428 bp, Bos taurus
  Clone ID: 02-LIB3058-038-Q1-K1-A9
atcatacacttatttctttagtgtctcacttggataaccgcaataaaaatcctgtgggcctaacaggcatttctattgggatttttttccccttgtcttttatctccctgctctatataagttggtgttgatttctttatttattttatgtcccaatctgtatgacagaattataataatctcaaagattattttaccaaaggttgcccatttaagcatattttcattttgacacagaaacaagatttggtccaacttttcctagttcccaggtcttgattttcatcattcagtacacagcagacctgtacctaattgtgataccaaaatccatggctgtctttagttccctttgaagaaattttgatggttgtttatgtctctaatatattcaagccctcaatgattcttgaaacccccggttattt

SEQ ID NO: 2425 - DNA, 202 bp, Bos taurus
  Clone ID: 02-LIB3058-039-Q1-K1-A5
ggcaacaactctcccacttaaagccaaatgcaagggtccaccgtgagggaaatcgatgccaaactgatgaaaagggaccccagccctccgtgcgtgaatcatcgaggccccaagacacttgcactgtgtagagccttagacacgataaaggaggagcccacggaagcgagacagaaggggacgcgatccaaatacagggagc

SEQ ID NO: 2426 - DNA, 177 bp, Bos taurus
  Clone ID: 02-LIB3058-041-Q1-K1-A5
gacccactcgtccggttgtagatcgcgagcggccttcctcaatattattcccttttttttttttttgtttttggttaatttttaaattttttagccctcacaaatttatcatctatttttacaaccatcataactctatcattcacctcataaacaataactcaccaccaccaacca

SEQ ID NO: 2427 - DNA, 294 bp, Bos taurus
  Clone ID: 02-LIB3058-042-Q1-K1-A5
acccacgcgggcgacgatgtctcgcagggtggacatcgatttataatcatataaggcatttgaatgtttgcacagctgtaattaaattgcacattgaactggaaaagcaagctgatgcgctcgtagcacctgttggtacttggcacccctcatcccggttcaactgggtttgtgtaaaggcctggcgcgtcttgtgtgagacatggccccttggtttcccttttgggtccctttttaaaaagtgagagtgaacccgcgctctaaaaagaaaagactcaaactgctgctgctctc

SEQ ID NO: 2428 - DNA, 428 bp, Bos taurus
  Clone ID: 02-LIB3058-044-Q1-K1-A5
cggactcttgggaaaacttttgatagttgagattgagggtgagtgtgaggaagccaagcaatacagatttgttgcagttcattcttgccaagcaaattggtagtaaatgtcacattgttatgtgaattgagcacatatttttaaggttaaaataaaacacattagtaccagctatgaagcaatactttatcaatggggcttaaagtctcactgaaattattcagaagcagcccaggtagattctgtcctcaggtgagtagcaatctatgtaaatttccccaaaagacaaatcaataatcactgcaaagacaaggataggtcttgcttccgccaaacacagtttctgataatatgattgtagggctagtatttttgctatgttttaggaaatagatacatagaaagtgtactggtgtgtatttaaattc

SEQ ID NO: 2429 - DNA, 280 bp, Bos taurus
  Clone ID: 02-LIB3058-047-Q1-K1-A5
ccagggatcaaacccatgtctcttaggtctcctgtgttggctgggaagccttagtaagtgccttataaagtgcaatgtaattaggattttttaagattaataaaatgcacggaactattgacattgtttcattggaatgctcttaagtctcaaacagtcctataataccttattaagaaactgtttcctgcctcctctgttttgtgatttcagtaagaattctagtgttcatcctgaaatcacaaaacagaggaggcaggatgaacactagaattcttac

SEQ ID NO: 2430 - DNA, 80 bp, Bos taurus
  Clone ID: 02-LIB3058-047-Q1-K1-A9
ctaacaacaaatatactaacaacataccaaagatcacgacatgccaacccagaaaccaccatccaaagacaccatacccc

SEQ ID NO: 2431 - DNA, 437 bp, Bos taurus
  unsure (394): Clone ID: 02-LIB3058-048-Q1-K1-A9
ctgctgctgtatttattgagcaccaactatgtgccaagtctctatcaggcactggtatacaacactgaacaagatggtgagatccctgcccctgggagcatcccgttgctgtccccatgcactgactcccaccccctgaaaaatggttactctgctgtctctttagacagccggacaggtcatttggaggggaaggatgtggcaaagggggtgaaacggggctcccaggcttccaggatggaggggttattggggggggagcatgctcaccctcagttctgaccacactgaagcagtgggagtggaagaggagcaggaagaccccaaactcaggcttggaagccagccctgccatgctccaactcctggaggctcagcccttgtgaaggagcanaagacagatgatgcaaggagtcatctcctgcctggtggtgggg

SEQ ID NO: 2432 - DNA, 451 bp, Bos taurus
  unsure (24),(39),(78)...(79),(98),(133),(147),(159),(357): unsure at all n locations; Clone ID: 02-LIB3058-049-Q1-K1-A5
gccgggagtttcagcttttagcantaaactcttattagnccttcttatttttttcttgacaacgttcttgtgccgagnntccccacctcaacaatatncttagcagaccctcagttctcagaatctcttatantttctttgacatanttggggattatnctcaaggttcttcagcccttcaaaagggagaacgtagactttcaggggctcatcccctgagttatatttctatttgaaaagacttactatcaagtaggccaagggttgttatccttaacaagtaagcccttggtgaacttggatttgactctattccaacaggacagaatgagacagggagaaatacacattaagctntaagacgccagtctagatatgcctatttccttttggtagaagtcaattacatggtaattcctaattgtgagggaatcaggtaattaaaatcttt

SEQ ID NO: 2433 - DNA, 320 bp, Bos taurus
  Clone ID: 02-LIB3058-052-Q1-K1-A5
gttctagatcgcgagcggctgcccttttttttttaatgttacatacgatagcttgctaagccatgaatctgctattgtgacatctaaattcacaggactgacctaagattgacgtcatagatgctgacaagtcgtaagagcgtctcaagtgactggcaaagcatgtcaagtctcagttagcgagatatcacgcgatcttagatgtgagcaaaatagtgcgtagtagaacatttgcgtatatggaattgctattgttacatgcattgcttagctgtagctagttcagcagatgcagtggtcaatcgcaacttgatcattac

SEQ ID NO: 2434 - DNA, 276 bp, Bos taurus
  Clone ID: 02-LIB3058-053-Q1-K1-A5
ggttctaatcgcgagcggccttctttttttagagtttaaagcataaaaaagttattggagcatcacagctgattgggcggtattgctgagtagtggatggggagtggggccgatcccgcggcccttagggcccctaaatgcattggtgctgcagggatggggtttttgcatagagaggtcgtaccgccgttcttcggcaatccttgctttttggccaagttaaccaagtcaagcttgggggccggcccggccccgggcttgaccgttcttgggctt

SEQ ID NO: 2435 - DNA, 428 bp, Bos taurus
  Clone ID: 02-LIB3058-058-Q1-K1-A5
acgtcgacacctgggctggacttgattattttagtgttagctatcagaatttggaacttggtttcttcatgggcttcagttgataaaccatcgtttgataacttgacaaagcacttctgtattgttgacattcgtctctatattgtcattaccaaggctctctgggctagttctctgtaaaatttagttttcacaaaactgtacgttctgatttttgattaaatgtttcaaagtcaaatgatttaatcaaatataagaaatgatgagctaatggaattgatatctcttccatggagtccaatcaaatcctgtctgtaaaataaattagcaactgatcatctcagaaattacaaatacagttgcatggttttctattttaattaaagagttgaaataacgttccattatgaattcatttccctctttta

SEQ ID NO: 2436 - DNA, 335 bp, Bos taurus
  Clone ID: 03-LIB3058-002-Q1-K1-A11
acgccttacgttccgctgcgtaaatgctagctgctctcttactcacatatgccctttgacccagtcacggtgagttcacgacagcagcggtgcaaggccctttcctcacccccgacatggaacactgtggctaccacatgacacagaccgatgagccgacccttatgaccatatcctacgtaattgctgccatatgcacgctattcatgctgcccctctgcctgatggtgtaccactgtcgctgcctccgctgcctgcggctccagcacgactactttgctgatgacatctccctgctgaattgaggaagccttccctcaatacatatagatcca

SEQ ID NO: 2437 - DNA, 218 bp, Bos taurus
  Clone ID: 03-LIB3058-005-Q1-K1-A3
gcagagtgaagaatggactatgccaatgatgtgtgggctaagtagaaagacaagaggtacaagaaaagtacatgatatgattatataaaatatataacaaaattttatgtgttcaatattgtattatgtaaaaattttatatagaattaatcagaatcagaatccatgctactgctaagtcacttaagtagtgtacgactctgtgcaacctaaatgac

SEQ ID NO: 2438 - DNA, 384 bp, Bos taurus
  Clone ID: 03-LIB3058-006-Q1-K1-A3
agatcgcgagcggccgccctttttttttttttttttatcaagttctttcttctttttattggcaaatatatttttatgaagaaccaaagaaaatatacataattgtaacatatgtacaccagctttatagattttatttcaaatttacacaatgttgatatgttattaaaagattttctgtcgatgcacctatgtacactttatttacatacattcataggatgtgaaataaacctctcaaaacaagctagttcatttgatattaatttctagacaaaacaaggaatgcacttctagatcagggcttgggaagctctactagctctctacaccagccctctcttcctgaaggtgaaggatttgtctgcaaacaggacgaggggc

SEQ ID NO: 2439 - DNA, 415 bp, Bos taurus
  Clone ID: 03-LIB3058-008-Q1-K1-A3
gacccacgcgtccggactagggcaccctgagaagtctgcgtgagctcggctccccagggcctgccttctccactggccactgtaatggcccagcaggactggctggccccccctcagatgtttgtcagaagctgcgctcggggtgctttgggccccactgcggacagcctccagcccatgcagcactctcttcccactctcccagggcctgcaagcccttgggcctatcttgccctgcagtttggggcctgggctcccccaaccaggctggagaaaggagtgatatacccagggtgacccctgcagatcagagcagtgtcacaaaacttggcctcagccccaggtgtggacttgacactggtgactggactacctgcaagacattgctggggtggctggtgcagccagcgccatc

SEQ ID NO: 2440 - DNA, 337 bp, Bos taurus
  Clone ID: 03-LIB3058-009-Q1-K1-A11
ccctccttccaggaggagccatcccacatttgggtagttagtacccaggactgatcggactgatctgggttagggaccctagagggttaagggaacaacagagatggggctgcagtaccctgtctggaaccccaatctcgccctgggtggctctgattgtggctgatgcctggttacaaattgatttttaacccaagaattatgattattttttaaaaagccaaacagattttggcaggagttagaataaagcctggggcctgggctcctccgttctcgcccctccacagccttcttcctccacggggaggccagaaggcaaggaggatctcagcca

SEQ ID NO: 2441 - DNA, 416 bp, Bos taurus
  Clone ID: 03-LIB3058-009-Q1-K1-A3
cagaaaactaacatatccgtgtttaaaaacaaaggtcaggtcctttgtagatgatttgaagcatttgacttttgctcctgaaagttttttaattggccatatatccatcatccagctggatctcagtgtcattcctcgggacaccaggttcacaaagtctgttcacaaacagactgtatcttttttttttttttaatccaaaaaaagcaaatataaagccaaacagagatctctagatcccacttacttattctagcagtattcctgaagtggtgcttaagggtcagaatttcctggatctttgctagtcaagctttagatttgatttaactgggaccacatgcgtgtcatccctctgatgcaaattagaaagttgaatttatttcagattaactcttgatgtctgcctgggtttt

SEQ ID NO: 2442 - DNA, 242 bp, Bos taurus
  Clone ID: 03-LIB3058-010-Q1-K1-A11
cggttcggaattcccgactcacacgtaccgttctatatctcgagcggccatccttttttttttttttttgtactcaatactgatcacgctgatgcttattatgcaacccgagaaggtgcctgactcaacacccatgggtacatatccacactttgtatccccctttttgatctgtgtagctctgactgtgattgatgcacatttacttaaaaatcttttaccactgaattatgaatattcat

SEQ ID NO: 2443 - DNA, 398 bp, Bos taurus
  unsure (329)...(330),(367): unsure at all n locations; Clone ID: 03-LIB3058-012-Q1-K1-A3
tcgagagccgcagacttctgggatcatgagtcttccgttactgtacacttctggccccaagtcctgctcctgcaagtccacctgttctgtgctcggagagccggggaaaggagcatagcccccttcaccatggagccaaagtgtttgcctctccttttggggggccttaccctacctggtatcctactcaagccctaccagagttcaggttcagctgccacccagtggcacagaaccaaggaccctccatcaccttcacagggccctgtgaattccattcccattgccctgtacctgccaggccttcccccttccaggaggaagtctgnngtggggatgggcacatgccagcaccacccctggcctncttaacttctccccatgcccgatcacaaacc

SEQ ID NO: 2444 - DNA, 285 bp, Bos taurus
  Clone ID: 03-LIB3058-019-Q1-K1-A3
cggacgcgtgggttgagcacctgggatgggtagggggcccacgccaccaccaccgcccgcaaacacagttcggacactgaccgtcgtagcagccgcaggcagcagccgtcgggagcgggaacactgagctacccagcagcaggggatctcgaggcgccggatgaagcaagggctcgacccacggaccacgagctgatatcgcaagctttcggacgccaaagccagaagtcgcgcatcccgcagggacgggctgcgatcaagacgagagttcgagagggcggatga

SEQ ID NO: 2445 - DNA, 315 bp, Bos taurus
  unsure (253): Clone ID: 03-LIB3058-020-Q1-K1-A3
gggatggagagtccgtgggatctctttacggcctctggactggaggccgagccccgcgcccggcgtctccgcccggggtgctctccgcagtttcctggcttggaagcctcgggaacatggcgaggcagcggtggtttaacgggaaggacggtgactgttagcctgtgaacgaaagcgagagtgagccgtctcacgctccggaccaagagtgatcttgaacttgtggctgctactagatttttgcccacacctnctcgtatgctgcggcttctccactggagtggggccagggtgaccgtggacttgccgcaagtc

SEQ ID NO: 2446 - DNA, 266 bp, Bos taurus
  Clone ID: 03-LIB3058-022-Q1-K1-A3
cacgcgtacgcgtactatcgccagcggtcgtccttttttggttttctttttgccaggatctttattacgggtatgttccaaacatcagtttaaaataacattactagcatctagcatgccaatctggcttaatggttaacattatatcaattataaaacgtttgaatctcatactttgcattacaataaagcattaagagaacttattaagattccctggttaatctgacatttacgcgaattatcattaattgtatacaaatttt

SEQ ID NO: 2447 - DNA, 402 bp, Bos taurus
  Clone ID: 03-LIB3058-023-Q1-K1-A11
ggttgggtgggctgacagtctgtcccacctgccaaagagcatggtcacatttagagccctttccaacaggtgagctgtgatgtttgcctatgcagttaatctaatacttctaaatggaaaatctgtctcataagctgacaaatgctgacattataactgttaaaagaactgagaatcagacttctgcattcagtgggattctcccgacagaaccacactttgctgggtctctgggatttggggcaggggagcagggggctcagggcaggtcacagctctgccctggagatggccatacccaagcacctgcaccttctgttctgtctgtagaatgaaggttatgatggatgtgtctgatgtgcagtgaaggtcattcttgatctgtctgtgcagacagggtct

SEQ ID NO: 2448 - DNA, 140 bp, Bos taurus
  Clone ID: 03-LIB3058-023-Q1-K1-A3
agctgagttgctgttgctggtcggagagcctcagtcctctccctggaggagggggtggaggatctagttaacctgagcccgactctatcccctccacttgcatacacactgatcgacacgagttatgtaagccttgaact

SEQ ID NO: 2449 - DNA, 274 bp, Bos taurus
  Clone ID: 03-LIB3058-024-Q1-K1-A3
cttacacgcgtcgtccgcaggctatctgcaccacaagcggttgcctgtacatacgacacgacgtggccgcgctaccgggcctgcacgccttgccattgcaggtcacgccttcatcctggttattctatcaccaggaagcaaaccctggagagctgaagccgctctttgagctgatccgtaactcaaaggtaacatcccgcaaaagtgccccgtcacctggtgggcacaagtgcgatagagccgtcttaggtgagtgagatgaaggtgctcctat

SEQ ID NO: 2450 - DNA, 315 bp, Bos taurus
  Clone ID: 03-LIB3058-027-Q1-K1-A11
cctttttatgttttactgtctgtattcaaaatccgagcaatgattcaattagggaatgctttagtaaccaaacatttacttaatcgtaagatcctcctgacccattgatcaaatccaaatctcctgcttcacactcagactctgtaccatctcagccattaggtaatacctggacccatccaataccctcgatttgctacatttccaaccaaacaacttcacacacatggttaaaaatcatatagaaaagaatgcaacagtttcaaacttcattcttttataaccaatttttaaataccaactaaaatttaaact

SEQ ID NO: 2451 - DNA, 381 bp, Bos taurus
  Clone ID: 03-LIB3058-029-Q1-K1-A11
gcgggcggagaccagaggagcgtcgtcgattgcttagctgcagctgtaaccctgtgatgtggacatggcttcatcagcctctgtgcagcgttatggcttgtgtggtatttgacagaatcgcaataagattcccccattttggtttcagaaagacaggagtagtatgtttgtgtaactcatgtagcacttatcacctttaaaaccaacaccttttcccataaatgttggtggtgtttgttccggtacttcaattatagcttgtgtaatgttaatgaatatctgtatcttatgacttccataaatgactagttgatattcagaaacataattctgggttttgagggttgggggaaaaaccactaaactataattggaaaaagc

SEQ ID NO: 2452 - DNA, 434 bp, Bos taurus
  unsure (30): Clone ID: 03-LIB3058-035-Q1-K1-A11
gggtcctgagcctctgctcatacagcttgngtagtggagagcccgtctcttctgtctgtgggctttgcagaaaactgtcttctgtggaatcagtattggtttctctagatcctctattcatgatctttattctagcctttggggccatgagaacaaaagtctggctcttctgtaatcacaagtttaaagctcggttgctttaaaaaagttctttgtctccccaggtcctctttagtgattataattatagggcccagaggccctgggaatctgtcttctaaaataggcctccaggtgatgctttctttcatctccattgagaattatttttcatgctgtttgaagacctagagtttgtccctgctcaagataactgaaactttgctgctgcagcacatctccagtcctccccgtagccagtcctgccactggag

SEQ ID NO: 2453 - DNA, 452 bp, Bos taurus
  Clone ID: 03-LIB3058-036-Q1-K1-A11
acccacgcgtccgctggatacttagaacgtattacttaactttctgtttaccgaaacgcttggattatcaggagctacgaactaaacccaaggtgccggctgtggctcgcggtactttggttgacggcttttacaaatcatcttcagatcatggtcgaaccatggaaacccccatcttcgcgtctgcctgctagagcgtttgcttttcctgattgtggcttttgtgacattatctctcagacagttgtactttttgataacttggggaaaacaaaaattacttgaataagggattgcctgacccgctgcatcgcagggacacagtctttgtaaagaacgtaaatgacagttgtgaatattaagatgtgattatcttttatctgtccatgtgctcattgcacggagatagtgaacaaatgattatactggggatttttttatttataagatct

SEQ ID NO: 2454 - DNA, 344 bp, Bos taurus
  unsure (257): Clone ID: 03-LIB3058-036-Q1-K1-A3
gagtggacgtttaacgggggtggaggttaacaggaaaagaaaaagaaaggaaaagtggtcgttattgaagacaaaaacttggtgcgaattttctcttgagaagcctgtattcgatttcaagtccagaatagcgccgaaaatcttggaaccttgcggaccttgggttttcccccggtttctttttcgtacccgcttcgtaccattcctctttcccttaaaaacaatcacgaaagaccaaggttggggttaagggttgngacgaagacggaaaagtccaccaaggccaggaatccgtattcccaacctttgaccttgtagtgttatttaatatctttgaacttaag

SEQ ID NO: 2455 - DNA, 92 bp, Bos taurus
  Clone ID: 03-LIB3058-037-Q1-K1-A11
cggttcggccggcctggcccaacccgtccgcagatctgtgtccccaacttgttggtttaattgtatgcagttagtaaaacattgaatggttg

SEQ ID NO: 2456 - DNA, 447 bp, Bos taurus
  Clone ID: 03-LIB3058-038-Q1-K1-A3
acccacgcgtccgagaagctgaaggagatactgaaagccctttgacttctacaaggccttagtggtctccgtcgacgtgaacagcaaagaaatttctgcagagcgagagcgccgagtccaaagaactccaagatagagtcggccagctgaccctgcgctggaacacggccctgggcgcggtggagagctggagagagggtttgcggcggtcgctcatgcagtgccaggactttcaccagctgagtcaaagtctgctgctgtggttagcgagtgctgagagccggcggcagaaggctcatgtcaccgacccggaggcagacccccaggctctcctggcgtgtcaggaagaactcgtgcaactggaaaaggagctagtggaacgtcaacctcaagtaaattccttacaagagatttccagcaccctgcttatcaaggggcatggagaag

SEQ ID NO: 2457 - DNA, 287 bp, Bos taurus
  Clone ID: 03-LIB3058-042-Q1-K1-A3
cggcagtgtgacctcatgacagtcatgtgacctgtgtgggggctcaggctcgggcaccgggccctgtgtctgcggctccagcccagacacccttccctgagagccaggttcccttctggaaggagggaacattctagagcttctgcctggtgggaaagcccgggttaccctgatggcaggatcaggctgctggggagggagtgcccccggtccagcgggtggaggcgggatcacaagtggcggtgctgtgagatggggacgtggtgggcactctggccaatttgggc

SEQ ID NO: 2458 - DNA, 430 bp, Bos taurus
  Clone ID: 03-LIB3058-045-Q1-K1-A11
cacgcgtccgtctagatcgcgagcgggcgcccttttttttttttttttttttgctttttttttttttcgccctaacccggggactgacctcttccatgtagcggtcacctgcgtgcaatcattgccacccagggtttcgaggcaaacgcgcggccctgggaccgcggtggcggctctgcctcgggcttccacctgtgcccttccggggcccctggaggacagggtgctcggccgcccactggcgccctggtggtctcactggccccttaggaatacgcggctccatctcataagcaaaacctcctcccacagcccccggctcgagcgacactcacactgccatcaaagccacgggcgtctgtaggctgggcacgggacaagctacctcgcggggcgcggtgatgtgtaacggtcacttccggtgcggggc

SEQ ID NO: 2459 - DNA, 435 bp, Bos taurus
  Clone ID: 03-LIB3058-045-Q1-K1-A3
gtgccccctcctccatgagtctcacagttacggtggaatagatggtagcatagttaagagaaagttctgagtcagtacacatgtgttgcatatctgttgtgtgacaggcaatgggtaagctgtgtgccctggtatgaggctgtctgagctcaaagcccagctctgccacttactcgctgtgtgacttcttcagcaagctaattagcctccccacactttagtttcctatttgtcaaatgagagtggtaaccacagcacctctcatttgagggttaagacagagccaggctcatggtaagtgcccactaagatttagtattattattctatgtcacaggaactggggataatctatagaaaaagagacagatacctgtcttcttgatgtttcaaaattaacaggaaatgcaagcataaaatacaatctcttaacaa

SEQ ID NO: 2460 - DNA, 314 bp, Bos taurus
  Clone ID: 03-LIB3058-047-Q1-K1-A3
cgacccacgcgtccggccagcattgtgtgagatccgcacttctcttgttattcgtttccttggaatagttttggggccgttcagactgcagagcccttactctcctcgtctcggggccaagcccttgggtctccttgctgggcatgtcccatgggccaccgtctacccctttcctcaaaacagatgaaaaggatggatgttcagcatttccagaatgcctcacaccaatgtgtaacgtctgccccaatcatcactttgatccggcctgagaaataaagtgagctggcactcccatctctaaattctttgaaatc

SEQ ID NO: 2461 - DNA, 303 bp, Bos taurus
  Clone ID: 03-LIB3058-051-Q1-K1-A11
gggttgaacactaggaggggacactattgtacttacgatgtgtgcgtaccacagaggcgttatttcagtgaacctgttgagctcatactgctgttaggattggtgttgagagcgctgctattgatcatgagagcctcctgggacagggaacgcttggttatccataccatgtaacaagacgagtgttgttactaaccgggctgttccctgctcagtgaacggtcccctcgctagtgccccacctggagtctgacttgaattggttgagtatcacggaggaagtgctttcttgagtcgtgacca

SEQ ID NO: 2462 - DNA, 451 bp, Bos taurus
  unsure (370): Clone ID: 03-LIB3058-051-Q1-K1-A3
acggcaagcgaagatttgtatcttcatttgcaacctctgggatagagacagacagttgttttcgggacagggagcaagcatgggatgagaatgtataatcaataacactaagtaataaaagcttgtaaagctttccgcataaagattcagcattctattttgccttttttttaaaaaaaaatgtagaatccaaatgaccttgtaaggtccttacttcacatttagatgagtgaacaaaattgagagcgctactgcttttagacaggtagatggttaacatttatcttagcttaggagatagcgcaataaagatcattcaacttttcttcaaatgataacacattactcactgacgactcaatgaatgatnttgtagctcctttggagtccactgcagttgatttttaagatgtacatttttatgatgttaaaatatttttcaaagtttaac

SEQ ID NO: 2463 - DNA, 337 bp, Bos taurus
  Clone ID: 03-LIB3058-052-Q1-K1-A3
gcattttagacctaccccggacctcgtcttgagtgcctacagggactggtggggctgacggtgttgggaaacagtcatgcaagttgcttgggaagctcttaaaaatgacggccatgctggggctgaacatggatttctcgagcggatcgggcggttgcctgttgggccccgtcagtaggtcagcggggctgctgagtggcaagtggcttcagggttcccgggcctggctggggctccccgacacccggagacttcccgtcatttagcagaccatgggcaggacgcgcgggaacgagtattagccaagcaacattaaacgcaagaataagcatggttg

SEQ ID NO: 2464 - DNA, 99 bp, Bos taurus
  Clone ID: 03-LIB3058-054-Q1-K1-A3
taactcctgttccccttacttcccaactcccttgccttactgcgattaccacctattgtagatcacgcattctccactgaagacaacagtcaacatcag

SEQ ID NO: 2465 - DNA, 417 bp, Bos taurus
  Clone ID: 03-LIB3058-056-Q1-K1-A3
ggaactcaggagggatgagagaggcggccagggccccgggccgaagcagtgcggggccgggggtccagcgggactgagacacgccgattgcccccacacccgtttcctgtcccctccatcctttccttccatcctccagcttgaggacggagatttattcaaattttatgtaaatctctatctcccgagggtcgcgcgctgaggggaggggaagagggcggggccgcgcgaaggctgcggggtcaggggcccagcagcttccttcgaccccttggaaccgaagggctcttaaactggccaaggacctttgggagtgggcttcggaaaggggccagttaaactggacggggcactgggtagaggcgaggtggggcgtggtgaggggaactaggactcgaacccccggactgggtgggg

SEQ ID NO: 2466 - DNA, 424 bp, Bos taurus
  Clone ID: 03-LIB3058-057-Q1-K1-A11
agcagacacgcagggaaggaaccatgggaataccacaggtagttaatgttgctgttgttcagttgctaatgtgggaagaggtaaatttcctacttttatttgcatttgagttgttggtttctgctttattatttttattgatacatttgagacggatcatttgtattccaggtaagtttattttgtcattacagaattaaagagactctggatgaaataaagaggaatataaccaagtgtgaagatgactttcacggttccttcataagactgtaatgatttccgacactttgatagaaaaaattcaaagctgtgcctttgagcctatactatactgtgtatgtgtggaaataaaaaaaaatgtattgtacttttggaaaattttttcataggcatttttctgtcagatttgtagcaatttgtg

SEQ ID NO: 2467 - DNA, 299 bp, Bos taurus
  Clone ID: 03-LIB3058-058-Q1-K1-A3
tctagatcgcgagcggtcgcccttttacttatccctttctgtgcatacatctctcccctccgggtctgttgtgtgggaatgcagctctgctccttacccgtgccttccatacccctccctggactctttcttactcctcgtagacccctggatgatgccgcatctggatctggacaattatcaaatgtatcagcggggagagagcaaaagacaaaattttgagctaagataaggtaaattgaaaacttataatatggataagatgtcaaaatctgatagaacaaaaatctggctatata

SEQ ID NO: 2468 - DNA, 340 bp, Bos taurus
  Clone ID: 04-LIB3058-003-Q1-K1-A7
cggacgcgtgggtttcaaggactatagggaccattctgtgatgagtcctttaaaatggaggttgtactaaggtaagttaagtttctgttgcagccattgcaaattaccacatttaatggctgatgtttattaagctacacatgtgtattgactatcacagatttgtatgtcatctggatgagatgcatctcacctggactgaaatcaaggtaattgtataacttatattccgtactttgaatgtattacattattacattgctcattcacttgtcaccagacttcacgtctgtgcaatgtaaggctcatgagatccttcaatgtccttctagctgccctt

SEQ ID NO: 2469 - DNA, 431 bp, Bos taurus
  Clone ID: 04-LIB3058-004-Q1-K1-A7
cttttctcttcctccttctcataaaacagttacagctgagaaaacaaaactggcaaagtaggctttttgtttactttgctttccctttgattgtgtccaggagaaagatactgtgcgttggactccagctttcttactgccctcttctgccctcatgtgtccaccccacttccttgagtaaagtctaaacattttaaagggaaccctgtagggtgaattgccagcttatggacattgttctttggggcccactttgacagccccatactcttccttatccatttaccaaaacctgggtgttttcttgagccttagcttgagaagctgaggggagatcacagaagggcttcacgacagacccagagcaggctgtgatccaaggtaataaaaacttagtttcactccacctttctaagcttggaaattttttg

SEQ ID NO: 2470 - DNA, 462 bp, Bos taurus
  Clone ID: 04-LIB3058-005-Q1-K1-A11
agaaagcagacatacagccaagccttgatacagtaaattcaccagtggaaagaaagtagagcctttttactcatttggaagataggtatttcctacttatgaggatgaaataacaaatgagaatctgcatatttattattcatttattatttaagttacaagcattttatgtacagaagtaaatgcaacagtgagtatatgtgtgtgtgcctgtgtgtataaaaataatcatacagattaacctgctaatggactcaggcaagtcatttaccatctctgggccttttttgcctgtcctctaaaatcagagaattgaacaactttatgaggtatcttccaattatacattccaaccattttgtcagactggcaaattgtattggcttcttcttcaacagtgttgttttgtaggtcattatttcatatacacagacatatgcaagatcagtttttttttttcct

SEQ ID NO: 2471 - DNA, 305 bp, Bos taurus
  Clone ID: 04-LIB3058-006-Q1-K1-A7
gaccgcgagctcataggacagatcatgaatacacaggggattgagaagctcgtctgaggctaatatccgaaagcatgaccagggagaggctagctaattataacatatgtacaccagctttatagattttatttcaaatttacacaatgttgatatgttattaaaagattttctggcgattcacctatgtacactttatttacatacattcataagatgtgaaataaaccttttaaaacaagctagttcatttgatattaatttctaaaccaaacaaagaatgcacttctaaatcaaggctttgg

SEQ ID NO: 2472 - DNA, 305 bp, Bos taurus
  Clone ID: 04-LIB3058-007-Q1-K1-A7
cggactcgtgcgcgagtcctgagtatgaataagcatgtgtcatactcatagagcttcagctgaagttctagaggatactgacatgcttgcttgaactctggatgaatggaaacagaaactggagtctcccaacagagaaactattatattacacaatccaatgcgattctacatatgataacctttggaaatttctatatcgcattcataagaatcttcctgcaatgcatgagccccactcccgatccttgccttgtgaaaattcccctggagacagataagacaatccatctcattattcttgc

SEQ ID NO: 2473 - DNA, 424 bp, Bos taurus
  Clone ID: 04-LIB3058-008-Q1-K1-A7
ccttgacagccgctttcaccacccaggtcagctccacggttcggcagtttggagcatgtgaacgtactctgagccttgatgagttccagtatgtggtatattatgcagagcattcagagcaaatactctctctcagagcgcttaatccgaacaatcgctgccattcgctccttcccacacgacaatgtagaggacctcatcagagggggagcagatgtgaactgtacccacggcacgctgaagcccttgcactgtgcctgcatggtgtccgatgcggactgtgtggagttactgctggaaaagggagctgaggtgaatgccctggatggttacaaccgaacagccctccactatgcagctgagaaagatgaggcttgtgtggaggtcctgttggagtatggtgcaaaccccaatgcactggatg

SEQ ID NO: 2474 - DNA, 424 bp, Bos taurus
  Clone ID: 04-LIB3058-010-Q1-K1-A7
tgaagcatagttcatatataattatataaattacatgtgtacaatatagcgattgagaattttttaaagtgatattccatttatagtcattataaaatatctgttaaatttctgtgttgtacacacactctgggtttaaatcctgattgtacttcttgggcaagcaacctagtgtccatgttggcacggttggctcagttttcctatctaagaaattagactatacttcttatagggttgttagggttaactaaatgggttaatatacataaaatgctataacagtgcttgtatttaatagcatagtaagcactgtacaaatgttaactatagtaattattatttctcacccaagaatcttttgaggccttaaccattccttcaggtccacgttgctaactggggaggaaaggcaatttgtttc

SEQ ID NO: 2475 - DNA, 421 bp, Bos taurus
  Clone ID: 04-LIB3058-011-Q1-K1-A11
gggttctgattgtttcatatttcatcaatttttcctgaagttgtaagtgaaaactttaaaacatcagtatcaaaaaaagaaaaagcttgacataggactcagtgttacagtttccacactttgtagtggccctttctcatgtttgaaataaggtctttgatagccctaccttcacttagaaatctagtcctactgtaaaaattaggagcatttttttaaacataatgccacttgttatggtatatgtctatataaattgttctctttggggaaaaacatatgatcaaattgggcatataactttgattatgttaattttgtttctttttaaatttttcagagaatttgtagatcttgatacaaagttattggaacacacttatctgttttgccagatagaaatctagacagataccacaat

SEQ ID NO: 2476 - DNA, 359 bp, Bos taurus
  Clone ID: 04-LIB3058-011-Q1-K1-A7
aaaagagtggcccagtgggcaggcataaagggcattttggaacattactatcctaacaaagcatttgatgagttgagatccagttccaggtaaaatcaaatacaattttcttagagcaacatgtacacttcgtggaaggattcaatatttgtcccttcagtatcacaaaagagaaaataagaccatacaatattgagaagaaaagttttagggtttgataaatctagatccaaaaattctgtgccttatctgtaaagtgagcacagtaatagtatctacattatgagactgctatgagggttaaatgaacagatacttaataccttgcatgtagaaagcattcaataattgttagctat

SEQ ID NO: 2477 - DNA, 335 bp, Bos taurus
  Clone ID: 04-LIB3058-012-Q1-K1-A7
ctgtgaactgcaagtcctgcctttctgtttctgttgtagtgaaagcttctgccgtttgcttcttggaccatgaagggcaaaaacaaaacaaaaaaatcacacacaaaaaaatcacaaaacaaaaaaacaaaataaaaaaaaaaagatgttcaaatccaagcaacaaaaacaacaaccaaaccgagaagcatccaccacgtccgagtccgtgagcccgcgagccgccgcacccaccgcagcgagggagcaagtctgcaggaagatggggggtggaaaggtggggggtgcctcattttctaccaagtcttccttccgggccccaatcggggcaacgt

SEQ ID NO: 2478 - DNA, 332 bp, Bos taurus
  Clone ID: 04-LIB3058-013-Q1-K1-A7
acactttctataaataattattttttgagctatttaaagaatattcccccaaagcgtacagtgccttgttgggatttttttttttcccctcccatgaaatagccattatttaaaatgagtggcagaggattagtctttaaagacagaacttgtgtagcagttcaaagctattcctcttcgagaacacatcaagaatcaaggagttgtatgtagaaacatggaagagcccttccacagtgttggtttcaatcacctattcttgcatatttaactaattgtgtggtagacctgtactcttaggtacacctattcagtcagtgggatttacatgt

SEQ ID NO: 2479 - DNA, 404 bp, Bos taurus
  Clone ID: 04-LIB3058-014-Q1-K1-A11
catagcaagtttgccatcgccttctccacctctgctttctaaggtcagataaacactgctctctttttttcccaattcattttcttctctcatggaattatttaatccacaggaaggctcttctgatgtctgataggaagtataacccaaatccttcttctctgagtagtgacatggtgtcccatcacctttcatgaatagctcactctttccccactaatgtgaaaggcacattttattaaatactagattatttttaaatattgcatctgtttctcagtcttcttttttttccctactgatttcctattttcacactggtggattcaatatgtcctcacaatacttttaatctgggatagcaaatatactattaatatgcttttctaaaaatctttctctat

SEQ ID NO: 2480 - DNA, 258 bp, Bos taurus
  Clone ID: 04-LIB3058-019-Q1-K1-A7
ctagatcgcgagcggccgccctttttttttttttttttttttttggattgtaattttaatgaaagtttcagtacacagatcgccattctttccctgctcctgtagaggttcctgactcagtcctcggtcgggagtggtccaggaaacatcatctttcccacggggtctcttagtgggagatttccaaggactcaggcctaaactgttcccatcaagggtttactcttagccctgtctcagacacagaaggccaaagcc

SEQ ID NO: 2481 - DNA, 450 bp, Bos taurus
  Clone ID: 04-LIB3058-021-Q1-K1-A7
ctccattcgctcttctctccagcagttcaaaccagaggcttgaaaggctgaaccctgttcaagagagaattaatcagcacatcctatcctgcccagaactatttaaaaagctagtgctaaggaggctcccagtgcagtgacagaagagggcaggtctggcgggcttgagtctggaggtgggtgagcagaaaaattcagcctgcccctggggctccccagagggtcaagaggcctacgagtgggctgggtgccccaagagtaggtgtgacccagctcaatacgtgaaacccccatcagctgcatctgcaggaactaagtccctctgagggagaagcctgtcgctctgggtggctttgcagctgcaaggatgaacaaaagaacagaaacagttaaaagacacaactgtggtcactgaaactgctgcttaattgcccacgcctgagagaaaag

SEQ ID NO: 2482 - DNA, 420 bp, Bos taurus
  unsure (364),(383)...(384): unsure at all n locations; Clone ID: 04-LIB3058-023-Q1-K1-A7
gtaaaaaccacttgctaatggttatgtggcttgtgtgtggttattattatgttctcagtcctgagtgtaaacacccatcagggatgcacagccaatgctgtggatgttggccacagatccatccagattattggatgggaggtcctgcctcttagccccctgatgagtattgcagaatccaggtaatgctccatgtctagtatacattgtttcctcagcaaagttacccttgaatcttttcctactcccccactgaaacttgtaattggtgtattgtgtttaaatcatagtctaagttgtgtttgctgttaactctcccaggatatctattttaaacagaatagcaagaataggaggcaagtgnttttggcctaagaaagggnncaattaatctaagaacccaaacagaatcctttccag

SEQ ID NO: 2483 - DNA, 401 bp, Bos taurus
  Clone ID: 04-LIB3058-024-Q1-K1-A11
ccagtgcttcctctcctgtcagtccccggcacctcaggggccctgcccttgtgtaaccacaagccttgcctgagacccgggccttttatttatgtttcccctgtttggctatgcctagatggggagggtatcgcttctgacttttaagaggcatccagggcaatgacaggcaccctctcggaaggcccccactgttgcggcccgctgtttcactggagggagggaaagatcttgtctggtggagggagaaggcttgccctccaagcggtgccagtgcgtcagccaccatgtgctgcccgacgtctccatcaggctctggtctcattcctcacggtggctccacgcagcctacttagcctagattaaaccctatcaaacaggccaaggtgcagagttagtgc

SEQ ID NO: 2484 - DNA, 265 bp, Bos taurus
  Clone ID: 04-LIB3058-024-Q1-K1-A7
tcgtcgaacggcaccgtcacggactaggtgagtacgagctgattgctaggactggtgctctgtgcgtgcagagacgactgacccaagcgaagacagtgagtgcctagaacaagggaagcaagcgcgtgtaggtcattacagacctctcggctcgagctcgtatatacctatggtcagagcccgcaaagctctactgtccgggctccgtggtgagcgttttgcatgaacacgcgtctcgcgccattgcatctcgacatcgtgctgt

SEQ ID NO: 2485 - DNA, 196 bp, Bos taurus
  unsure (77): Clone ID: 04-LIB3058-028-Q1-K1-A11
tcccgctcgacccactcatccggtccttttatgtgaacacagtctcattttttcacgtgacccactattccccaggntcgtgtttttagaattggggaagtccatttctacccctatagagtacctactagagcccatctctcttacactgtccatcctgtgtccatggcattattcttcctgatgcacccctacc

SEQ ID NO: 2486 - DNA, 237 bp, Bos taurus
  Clone ID: 04-LIB3058-031-Q1-K1-A7
acccacgcgttcgcgcacgactcctatgtacacgctttccaaaatcttcaagctgggaagacgagacacgccgttccgtgtccacgatagcaagaccctttatcccagctccactcccagaacctcttccccagcttcttaatacaaccgcctcgacgctaaccattgactaaattcccaagtgcagcatgcatcatcccaccctgcccacatgcacgttctgcatgcttctggcca

SEQ ID NO: 2487 - DNA, 257 bp, Bos taurus
  Clone ID: 04-LIB3058-032-Q1-K1-A7
cgcgcgcgcgcgcggcagcttctgctcagcctcccgctcacacctctttgtggggaggcacggaatgagaagcaccatggagcctgctcgagctgcggtttggccaggggctgaccgtgtccagctcccagagccgtcagaatctgcagcagccgtgcccgtctgcaggggagctcggcctgtcctgaggccctccagcccacctggtggagcaggaccacacgctggaaagggaagcttcaatggcaggattaggg

SEQ ID NO: 2488 - DNA, 394 bp, Bos taurus
  Clone ID: 04-LIB3058-035-Q1-K1-A7
gacccacgcgtccggaggatcactgcttcagcggcctcgcttccatgcacgctgagaacctctggccaggcggcctgtcctccgtccagcagatcctgcagctctgggacctgtggaggctgaccctgcagaagcgcggctgcaaggggctggtgcgggcgggcgcccccggcatccttcagggcatggtgctcagcttcggcggcctgcagttcaccgagaaccaccttcagttccaagctgaccctgatgtgctgcacaacagctacgccctgcacggcatccgctacaagaacgaccacatcaacctggccgtgctcgcggacgctgagggcaagccgtacctgcacgtgtctgtagagtcccgaggccagctcgtcaagatctacggctg

SEQ ID NO: 2489 - DNA, 454 bp, Bos taurus
  Clone ID: 04-LIB3058-036-Q1-K1-A7
cggcttgacccacgcgtccgcggacgcgtgggctggacttttttattttagtgttagctatcagaatttggaacttggtttcttcatgggcttcagttgataaaccatcgtttgataacttgacaaagcacttctgtattgttgacattcgtctctatattgtcattaccaaggctctctgggctagttctctgtaaaatttagttttcacaaaactgtacgttctgatttttgattaaatgtttcaaagtcaaatgatttaatcaaatataagaaatgatgagctaatggaattgatatctcttccatggagtccaatcaaatcctgtctgtaaaataaattagcaactgatcatctcagaaattacaaatacagttgcatggttttctattttaattaaggagttgaaataacgttccattatgaatcaatttccctcttttagaattatct

SEQ ID NO: 2490 - DNA, 432 bp, Bos taurus
  Clone ID: 04-LIB3058-044-Q1-K1-A11
ctaaaccttagaagaggagatgctgtctttttcgtcttggtggtgcttgctttagttagacatctcatattgaggttatatgtttatgttgaaaataaattgtttgggtcagacaagaacatggtaatttgaaaattggcctcctttcttgcaggcttgatttgcctggtgaccaagttactggtgactagttcactagctaggtcattcaggggagtcagaccagcacaaaagaaacatgtcatttttaaatacacttgatagtggtacctgtccaccttcttaaactcttctgttgaaattagttctaaagaagacaacatggcaatcctgaaaatgctcccagttgctgcagaatatcatatgcttttgatgtaatgtaggaatcctatttaccccagttaatgtaactttctgacggccttgtggact

SEQ ID NO: 2491 - DNA, 274 bp, Bos taurus
  Clone ID: 04-LIB3058-047-Q1-K1-A11
gacccactcgtccgcaggcaccttgtgcgttaaagatttaattacacaaaatatataattccagcatattaggctatattatctagttggcaatcattttaagtctcaccttacgctttaaactaatatccgtaattaactcacgttcaatatactcatactttacaaatcagatcacaaatgttagcgtcacacttactttagactgacgggggtagcaataccattaaacttttcaactactaacctttttgcaaccacaaatcctgtatta

SEQ ID NO: 2492 - DNA, 419 bp, Bos taurus
  Clone ID: 04-LIB3058-049-Q1-K1-A7
ttgatacatttattgagtacctactttttatcacaggtgctctgattacgtggggcacagcactgaataaaacattatccttgccctcgtggagcctatatattggtgatgggaaatagacgttgataattatacaaataattaaataggacagttgagataaattctatgaaggaaagcgtagtttcgcagtgtatgtgtgcatgtgcacacacatgcatcgcctgaccatctgtgtcctaatgcctcttgagtatagtcaggtttttcctactgctattaccctagtccagtctgtctccatcacgtacatgggctactagacaacctccctttatctcctctggcctccctccagtcttttgtccagagtgatttttttcagaacaccaatttgatgatcccactcctctgctctt

SEQ ID NO: 2493 - DNA, 349 bp, Bos taurus
  Clone ID: 04-LIB3058-052-Q1-K1-A7
gcccagggaaatgtgggcttcgctgtataagaaactacatttcccagaagccctcgttccgcagctgcggagcctataggctgcggaatagctggaaactgacggcgtgctgcggctgaacatggctttctcggtcggatcggtcggttgcctgttgggccccgtcagtaggtcagcggggctgctgggtggcaggtggctccagggttcccgggcctggctggggctccccgacacccggagactccccgtcattcagcagaccaggggcaggacgcgcgggaacgagtatcagccaagcaacatcaaacgcaagaataagcatggttggatccggcgcttgagcacg

SEQ ID NO: 2494 - DNA, 307 bp, Bos taurus
  Clone ID: 04-LIB3058-053-Q1-K1-A7
agctttgtctaatggtttaaatgtaacataaagctgacatataaaactatattcttgaaatgccagtttggaaataacggacatggcctatctcgaaggttactacgttttcccggcgtttgttcagtttttgaaaaacacattgatctcaggttggcatttgttttctgatttcttgattgttaatacaatttttcagctgtttttaaaattttcctctttaatttgttataaagggaaggggtttaaagagtgatgttaagaaacactttaataactcgcatcgggggtttggggtttttttttt

SEQ ID NO: 2495 - DNA, 392 bp, Bos taurus
  Clone ID: 04-LIB3058-056-Q1-K1-A11
cccgggtcgaaccacgcgcttcgaggtaagcttcaactcggaatcactggttatggcgtatcgaagttctttatatgaaagcactatcgcaccatgaaatttggaagggctccaggttagttaccagagctagcgcttttccgttgtgaattactatacatctgagatgtcttgttctaatccactgaaataattgtgctctaaatttgggacgcaaatctattctacctcattaacccagttgagattcaggtctgtcatcttaatatatcatgccttgaaacgaagactcttcacaaagaaacacactcttcatgctatgccagcattggcctgcttgtgccgatgatgtgattaaatgtacagaattggcttaaatttaacctcagagt

SEQ ID NO: 2496 - DNA, 382 bp, Bos taurus
  Clone ID: 05-LIB3058-004-Q1-K1-B1
gctatgcatcagagtcttctatagatcctttttaaaatgtagttgtctgagtaccactggtagagattttaattatgtacatctaggctgtgggctaagcatctatatttttaataaactcttcaagtgattctgagagcacagcctgaattgagaatgactgctataagactggcaatagagaaacagttttttctcttaaaaaaataaaaccagtaaaccattgaagtgagggttttttaataaatagccaagtttgggtctttaaataggaggcactctgcccattgtgccaaaattgtcttttcatttcttttgaaataggtaaggttattttatacgtctatgttgcctttcttcgaaagcacctgaagcactttat

SEQ ID NO: 2497 - DNA, 416 bp, Bos taurus
  Clone ID: 05-LIB3058-004-Q1-K1-B9
atttaaactattaaatatttagattttgcttttagactttataatagaactccttaaaatcatgttatatattttatagtcatttaattcctagtttattaaaagtactggttgttaaattcacttgatttcttaagaacagttatttaaattagttttaggagataagatcttcatttcaaggaaggagaatcaagtttgccattatgataatgttacccttagaaaggggaaatgtgaataataaaatctacattgttctattttgctttcttctgctttttagaagcctgaactcttaagctcaaatttgtaaggggagaaaagtagatggggagggtagaaccaaccacagtatttatttttctaaaacttaataaacccatatttttaaaaactattgtaaatgtgaattc

SEQ ID NO: 2498 - DNA, 181 bp, Bos taurus
  Clone ID: 05-LIB3058-006-Q1-K1-B1
gtcgacccacagcgtccgctcacaagcatcgacgagacaggcatattcatgtacgctgatgccaagatgtcctgacgctgtctgaactgtacgggcgccggctggttgagttttaccaccattgtaatggtgactggatccgaggcgaccagtagttcgtataaaggaaagtaacttactt

SEQ ID NO: 2499 - DNA, 285 bp, Bos taurus
  Clone ID: 05-LIB3058-007-Q1-K1-B1
gcgagcggccgcccttttttttttttttttattttttttgtttatactggtttaatccatgtcaatgtagtttacaaagggaaaggacaagtacctttgtatagaatatacagacacagcatcacaccatggggcccacaagagggcagggtagaccacacttttaccaggaagagcaactctaatcccaggaaaggttctctgtggaaggctggggagccagaagcacacttgtccaacccagtcttagcccatgcttcagctcggtttctacgcctgtgcctt

SEQ ID NO: 2500 - DNA, 379 bp, Bos taurus
  unsure (366): Clone ID: 05-LIB3058-007-Q1-K1-B9
cgccgacagcgaggctgagatggccgactggatgcagcacctgtgccaggccgtgtccaagggggtcatcccccagggggtagctcccagcccttgcatcccttgctgcctggtaatcaccgatgaccgcctcttcacgtgccacgaggattgccagaccagcttcttccgctccctgggtactgccaagctggctgacatcagcgctgtgtccactgaaccgggcaaggagtactgcctcttggagttctcccaggacagcgcgcaacccctcccaccctgggtcgtctacctgagctgcacacctgaactggaccgattcctatctgcactgaactcggggtggaaaaccatctaccaggtggnacctccccacaag

SEQ ID NO: 2501 - DNA, 397 bp, Bos taurus
  Clone ID: 05-LIB3058-008-Q1-K1-B1
ctagttctagatcgcgagcggccgccctttttttttttttttttttttttttttttttgttttttttttttgacggttaaaaaccatagttgacttttaatttcgaaacaaattaaatacagttaaattaaaacagacgacggtgcatctgtgggggccgcccttcccactgtgtcctccgggctttggcccgcccccccacttccgacgggggagcaaacaagctgtggtcaccgacccaaccatgggtcataacgaactcattcccaacgaagacggaagctgcagtccaccagggttataactaaataaatacacatgcagcgaaaagagggtgttaggtgaacaactgaactagtatctgccaaaaagaaacaaaaagagacgatcccgtttc

SEQ ID NO: 2502 - DNA, 370 bp, Bos taurus
  Clone ID: 05-LIB3058-010-Q1-K1-B1
attcccaattcgacccacgcgtacgaaactacaagacaattttagtatgttatgatattaactacacgtgtcaatatacgatgtgtgggtgaacagagtgatatcccatttatagtcattataaaatatctgatccattatctgacgctgacacacactttgggcttaaatcctgattgaacttgttgggcaagcaacctaatcgtcatgttggcacggttggcttaattgttctatctcagaaattagactatacttcttataaggttatcagggtaacctaattgggtaatatccataaaaagctttaccatgcctggatttaataacataattagcaactgtccaatgctaactattgtcattatta

SEQ ID NO: 2503 - DNA, 419 bp, Bos taurus
  Clone ID: 05-LIB3058-010-Q1-K1-B9
ggttctgattgtctcatatttcagcaatttttcctgaagtcgtaagtgaaaactttaaaacatcagtatcaaaaaaagaaaaagcttgacataagactcagtgttacagtttccacactttgtagtggccctttctcatgtttgaaataaggtctttgatagccctaccttcacttagaaatctagtcctactgtaaaaattaggagcatttttttaaacataatgccacttgttatggtatatgtctatataaattgttctctttggggaaaaacatatgatcaaattgggcatataactttgattatgttaattttgtttctttttaaatttttcagagaatttgtagatcttgatacaaagttattggaacacacttatctgttttgccagaaagaaatctagactgataccacaa

SEQ ID NO: 2504 - DNA, 431 bp, Bos taurus
  unsure (231),(340): unsure at all n locations; Clone ID: 05-LIB3058-012-Q1-K1-B1
taccggtacggaatggtggatcgacgcatgcggtgaaggcgttctttagccgcgtggtctgtctggctgttgagcgctcggtactgcaggacttggagcggaggagcaacagcccgctgcaggtcggcggcggggacgtcatccggatggagggacgtcgacccgagaccccggacagcaggaggccctccggcccgagttgttgttagccaggcctgcggcagaggcctncccaccctccacgaggcaggccggtggtgcctccgtgacatggagggggacgcggagcgcccactgtgctgagctccagggccccccgcctcctcttctccgtagcggngcgggagccagaggaggcccccactgccacccagggccccgtgctggaaggccagtcgcacctacagagttgcccatcagcccagccacag

SEQ ID NO: 2505 - DNA, 347 bp, Bos taurus
  Clone ID: 05-LIB3058-013-Q1-K1-B1
ggcggagccgtgggcggaccggtgccgcagtcatggcagcggaagagaaggatcctctgagctatttcgccgcatacggcagcagcagctcaggctcctcggacgaggaggataacagcgagccggaggaaacaagtcgtaagggtcaagatacagcgaagtctgccggcggctatgggaacaaggcggagaagcggctgcctggaccagacgagctgttccggagcgtgactcgcccggcctttctttacaatccgctcaacaaacagatagactgggagaggcatgtcgtcaaagctccagaggagcctccaaaggaattcaaaatatggaagtcacactatgta

SEQ ID NO: 2506 - DNA, 399 bp, Bos taurus
  unsure (233),(336),(357),(379): unsure at all n locations; Clone ID: 05-LIB3058-013-Q1-K1-B9
cccacgcgttcgagcccagctcccctcccagaaccccgtccccagcttcttaatacaaccgcctcgacgctaaccattgtctaaattcccaagtgcagcaggcatccccccaccctgcccacatgcgcgtcctgcaggctcctggccagcggctcaatggagaagacggtgcagctgtcagctcacccttgaagatcagcgaggtccctgagggtccagggtgggcgaccctncacgcccaccttctgccctgggacggccttggacgcggccctggggaccctgccgtcgggcccccatgcagagtgtggagaccggcctgtggctctgagcttnctttggtttctttcccgcctnctgtcacctcttaaagcacttnctttcctaaccgatcacagt

SEQ ID NO: 2507 - DNA, 182 bp, Bos taurus
  Clone ID: 05-LIB3058-014-Q1-K1-B1
gtaaacatgccacaacctcagagtacgtagttcttgtccagagactcaatgaaagagctgcctagggagcatgaatcgatcatttatgtctagaactagagagcatgcaacctcagagcaggtagtcttgaagtcgattatgaccttaaggaccattcaatagtggttaattaacagaatga

SEQ ID NO: 2508 - DNA, 349 bp, Bos taurus
  Clone ID: 05-LIB3058-015-Q1-K1-B1
gtcgtcctgtgcgccccgcgctcgccgcgccgcgccatgccgcccgccgggctccgcggggccgcgccgctcgccgcggtcgcgctcctggtgctgggggcgcccctggctctggctggcgaggactgcctgtggtacctggaccggaatggctcctggcatccgggcttcaactgcgagttcttcaccttctgctgcgggacctgctaccagcggtactgttgccgggacctgagcctgctcatcaccgagaggcagcagaagcactgcctggccttcagtcccaagaccatagcgggcatcgcctcggccgtgatcctcttcgtggccgtagtggccagcaccatca

SEQ ID NO: 2509 - DNA, 343 bp, Bos taurus
  Clone ID: 05-LIB3058-015-Q1-K1-B9
gccaaactcacaacctggagtgatgaacctgcttatacctaagtgcaggagcaagccggtcacaatgcagctgcatggatttttagtgcctactgaataatatataatatatataaaccaaaagtagttggaaaaattatttgaaatgactaatttgtgctatctttatggaatatgttaaatgtagctttttgaaacagaagccttgaattgaaatttaattaatacttgaacattttgtatatatatatatctttgtatataattatgtgcagtaccaatgacaaaaatatggtgtcataataaaatcaggtttgttgatctttcagttatgggctcaaag

SEQ ID NO: 2510 - DNA, 229 bp, Bos taurus
  Clone ID: 05-LIB3058-016-Q1-K1-B1
gggagttagtgtattcttctctggtagcaactatgggttacatggagccatcagaacggcttctggcctaccttgtgatggcatgtgtttgtagaatggatagctgaggttggcagatggctggacagaaatcacctttgatttaaaatgtatgtgggcccataatgatggagaccctgttctgtaatcaactgagctagttgcaataaagttaagcaggtttgaatcc

SEQ ID NO: 2511 - DNA, 188 bp, Bos taurus
  Clone ID: 05-LIB3058-020-Q1-K1-B1
gttctagatcgcgagcggtcgaccttttttgtcttgatttctcaagatgcctggtggctctccttagcttcgaatatgacatctcccacttgagtgtgctaatcatgtttactctttatgaacgcatggactgtaccccaacaatctactaagtccatggggattctacatgcaagattctctaagaa

SEQ ID NO: 2512 - DNA, 254 bp, Bos taurus
  Clone ID: 05-LIB3058-021-Q1-K1-B1
gcagtaatagactagatttctgtttgtaatacttaaaattagactgttgatccctgaaagtgaccagaaaaacaatgagatatgcccaagatataaaccataagcacaatatgaatgttctacagagctcaggtaaagcttaggttagggttaggcttagggtttcattatttgttagtaataatgagcataaaatagaagaaaaatagagcaaaaaagaaacctcagtcaatctaacaaggattgtcaacaac

SEQ ID NO: 2513 - DNA, 197 bp, Bos taurus
  Clone ID: 05-LIB3058-022-Q1-K1-B1
tcgacccacgcgtacgcctacatcgcgagcggacgtcctttattattattcatttctccccactttctacatcacatacactatatgcttgaccaaacttaagcgagcagatcgagcacaaggttccgcatctatctttcaatcccatgaaaatacacacatacgccattcgtcagaacttaattctctgcctgttc

SEQ ID NO: 2514 - DNA, 154 bp, Bos taurus
  Clone ID: 05-LIB3058-023-Q1-K1-B9
tagatcgcgagcggccgaccttgttttttttttttactacaccaattatagctcaagggcatagggctcttttttatgaaaaaggtcacgcccaattacgcaactaacaaaattcaaggagaatctgagccttagactaggtcaacattaattg

SEQ ID NO: 2515 - DNA, 418 bp, Bos taurus
  unsure (308): Clone ID: 05-LIB3058-025-Q1-K1-B1
ggctatttatgctgtgcaagcaggaataaatttgtttgaagttacaaagcatctcccctctcgcacccaagtaggtgttgaagaattacaactccttccttgcctttgacattcaacaggcctgactagatagaactggacagcttggcttaatctcatttcctctgctattgttatacatttattgtactgaatctatatcctaaatccaaagaaaaaagaaatgttctttcctgatatgtgtttcatactatccaaaatgtggttatgtatccttgtcttgatccacactgaacagaccatacatnctttattaatgtcaacatcctgtaaataaagtcctcgaagagctttttattttgggtggatctccatttcagacatgtaaaacccaacaattcactctcctttgcaatga

SEQ ID NO: 2516 - DNA, 357 bp, Bos taurus
  Clone ID: 05-LIB3058-026-Q1-K1-B1
ctagattgtatctaattagctagctttgttgagacactgcctgcatcattttggaaaggtgtgttattaaactctacttcagagaaaacagaccgtttacttttctatttacatctggtcataagtaatcagggtctcagtgctaagaaactctgtgctgaatagaccagccaaatcttaaaaggctttggaaagaaaaaactattacttgtatgaatcctctagagaactgatgatgaaaacttaccctagcccagtggtccttaaaacttttccattccatgactgtccaggccctacttcatttctcctacaaatccaaatcatataactttagtgtttcatgctactgggaaa

SEQ ID NO: 2517 - DNA, 344 bp, Bos taurus
  Clone ID: 05-LIB3058-027-Q1-K1-B1
cgcgtccgatttactttgaattcttattttcagaggagctggtttctctcagaagactgtttgcggtaaaggcttatctgactactggaaaattattttagagctatcctgtaatcatagatttttgagggaaaaatagatcatatgctataaaaattaatatatcacattcttcttatgtacaaataatgtgacagtctcgtttgatcaaattaaaattattaaacttaacatcttaaatagaactgtggattgtatctttcacattacagcacagacaccaaaatttggttatttttaatttcaaattattcgattagaatgattatttaaaaaattttttt

SEQ ID NO: 2518 - DNA, 168 bp, Bos taurus
  Clone ID: 05-LIB3058-030-Q1-K1-B1
gtatcttccagtggaagagaggtaattacctctcttcctcaactgatcttgaacttttctgcccaggtcatgttttaatatggtccatcttagtgccatatagaggttaaagactttgttattttaaaataatgaaaattggacattgaaagagactgattataatga

SEQ ID NO: 2519 - DNA, 359 bp, Bos taurus
  Clone ID: 05-LIB3058-031-Q1-K1-B9
tcttgcttatccagggctgtaggatggtggtctcggcagtgtgtataagattttttcccaggttacctaacctttttctgctatcctccagccaatcctaatgactcagtccacagcagtagttccagtgagaactaaaatacgtttcacaccccctatttatcaacccatatacaaaacagaaaaagagttcacagaatatgcccggaaagcattgactgttgattcctcatgaaagtttggatcgttccatacatctggcctgtacagctagtatctttgattcctatgtttcttctgagggtgatgctccaatgttatctctttctaatgtttgacttgctcatattactgatcta

SEQ ID NO: 2520 - DNA, 250 bp, Bos taurus
  Clone ID: 05-LIB3058-032-Q1-K1-B1
cggacgcgtgggcggacgcgtgggcagtataggcctgggtttgactcctgataccagcagttagaattttaacttctttgaaattaagttccctcatctgtaaaatgcctggtacatatatttactgagaactaatttattgagataattaaatagataatattcaggttaaaaaataaataagagctaaattctagcagccagggactcacaatcaaggggaaagaaagctaggcttagaaagatatat

SEQ ID NO: 2521 - DNA, 340 bp, Bos taurus
  Clone ID: 05-LIB3058-033-Q1-K1-B9
tcgctgacgcgtgttggctctggggcccagtttgacgctgcacactggcccctctggtcagggggctccatctccagctgtgagagtgtgtggcagaatgcctgaaacttcaactctgcaggttttgagctagacgcagtgatatactgagccttggcggaagggggaagaacttggctgggaggtgaccgaggtgggtccctactgggtggcatggcagcgagcacagatgtcgctggtctggaggaaagcttccgcatgtttgccatccatggtgaccccaaggccagtgcgcacgatatgaatggcacgaactgtgccaatctgtgcacggactgca

SEQ ID NO: 2522 - DNA, 431 bp, Bos taurus
  Clone ID: 05-LIB3058-034-Q1-K1-B9
cttggaactagagtggtcaaagcacctttgtgttcttcgtaaaattggagcagatagagaatttaagcttcaagtattttctggttttaaaaagaatacacgttttctttactctgtagcagccggggaaggtcacacaaagtttgtatcaggtaaggccaactgccaccttgggtagcctatggtcatgttcagccatgacaatgactcagaactcacagactaacgtgaaggaaacagcatccatttgaagacccatgttcccatccacagctctgtgccctgagggagagataagatttggatggagaaatagatttctaaagatcatcctacaatattttctttggaaactggtttagcccaggatattttaagagagacgaggtggcctatttatcttgtctacgtgaatggtatttgtatattca

SEQ ID NO: 2523 - DNA, 425 bp, Bos taurus
  unsure (31): Clone ID: 05-LIB3058-035-Q1-K1-B1
ccgacttgtttttgccaatgtgcctatttgnttctaaaaccagggttgaagggtggaggatacagggaacagatccttctcccagtcccccacccctccaaccctcatgaggctggaggagggaaggcagagccaggccccaaccacaaagggtacagagcccattgttcttccagacttggtccactttgcttgtgactcagaagccctttcgctaccgagcaagaccacactctcttgcctctttctggtctctgcttttgtacgtgtaagtgatatgttgtcatatctgttaagtgcttgtgccaacctcagggctctattcttactgttcattctgcctgtgatgttctggcccaagatctttgcactaatgccttcaactcaaataccatgtcagagaggcttccctgggaagtcagtgt

SEQ ID NO: 2524 - DNA, 428 bp, Bos taurus
  unsure (40)...(41),(47)...(67),(70)...(73),(75)...(77): unsure at all n locations; Clone ID: 05-LIB3058-036-Q1-K1-B1
acgcgtccgctagttctagatcgcgagcggccgccctttnntttttnnnnnnnnnnnnnnnnnnnnnggnnnngnnnaaaaaaaaagagaaaagatttttttttaggaagaaaaaaccgggattttattttcaaaattttggaaaccggtttcaaagaaattaaatggccagaaccttttccaaaattgcaacccttcattggaccatgagcccttggcaaaagaaaggcccttggaaggatttgaggccccctcctgaaagcccggatcccttttcaaaaggcctttacgcaaccagcctcctcaaaactttcccaaatttggtgaacctcatctcttaaaaggcaaccgggatcattttaaaacatttagaaccaaattaagaataaaatcccggggggatgccccttaagatatatggttttaaa

SEQ ID NO: 2525 - DNA, 393 bp, Bos taurus
  Clone ID: 05-LIB3058-038-Q1-K1-B1
cgtggttccagcgtgttgagaccactgctcttttgctattaggtgtccatgacgtcacggctgcttctgtgccaccagagacttccctcatcagtcctgcagacccttcctcctgaggtgaatgcagtttctgaatccttctcaacacggtgccctgtggagctaccatcagccagcctgatgcatccgttcccagctaaatcccagtggggaaggtatctttagattccgaatcccctaccctttttccccccttgaaagggtcttccttgatttttccacagccccccatcccccttgagtgattaagagcatgtttctgaaaatcccctctcctaacaggtccaagacaaagcatggctctggcgcaaagtcgaaacattcagtctcgtc

SEQ ID NO: 2526 - DNA, 424 bp, Bos taurus
  Clone ID: 05-LIB3058-039-Q1-K1-B1
cttttccacctcttctttgaataaggttttaaacttgctaagactgtacatttagaaggacagctcatctaatctgcaaatttgatgcgtaggatacaggaaatgcctcattggtatgcctggtttctcagacaactcaattagggtcttgaaaccacaaacccattttccttatatgaatatttctacaatagcaacatcacatatatgtaccaagaccctactgctgaacgcatattctcagaatgaactgtgtgcttacattgggtggtttgctaatgtataatctctcctaatgaacatctttcaaatttttggaaaaatcccacaaaagaaggggaaaaagcagctcaattaccattttaattttgtgaaaatactattttgggatggataacaggataaaaatttaaatttccaaagc

SEQ ID NO: 2527 - DNA, 123 bp, Bos taurus
  unsure (58): Clone ID: 05-LIB3058-044-Q1-K1-B1
tcgaggaatttctgagcaggcttcacaccctgacaccaacagctgaacaaacaggganaggcgagaacacgaccacggcaagccaaagaaccaaaacaggccggcggccctaaaggccccaag

SEQ ID NO: 2528 - DNA, 417 bp, Bos taurus
  unsure (96),(144): unsure at all n locations; Clone ID: 05-LIB3058-049-Q1-K1-B1
cgacccacgcgtcgactgcacagtccaagaggacttacttctcttctaacataactttaaaacccaatgggctttaaactgacttctcatgagcanatggctacagttgaccttctcttgattcaagatagagtggacatgggnacacagaaacctaacattacttacctgtttccctgggctcatggagctcaacggatctctaaatctgtaagatacaagagaacttgatgtcccccaagtcatgtttgcttgtgtgtgctcagtcttggacctggagggtggggcttggagatttgacaggcttgtctcgggtccaggctcccagtgtaaatgaaacagccaaaataacaaactcccaatttaggaatttgctatgggcgctgctcaaggaccattcttgggttccttggagtg

SEQ ID NO: 2529 - DNA, 208 bp, Bos taurus
  Clone ID: 05-LIB3058-050-Q1-K1-B1
cagaaagagccttgaacccaaactgccgctacgggtttggaaacttgcgctcaggagtggttcagcggttgcaggatgaattgagtgatggtatcgatatgaaagatccagatgagagctctgctgctgaacgaaggcagaaacgcctggctgatgagctggccaagtttgatcctgatcattatctaactgactgtatggaagatga

SEQ ID NO: 2530 - DNA, 362 bp, Bos taurus
  Clone ID: 05-LIB3058-052-Q1-K1-B1
gcccagtgaaatgtgggcgttgctgtttaagaaactacatttcccagaaggcctcgggccgcagctgcggagcctataggctgcggaatagctggaaactgacggcgtgctgcggctgaacatggctttctcggtcggatcggtcggttgcctgttgggccccgtcagtaggtcagcggggctgctgggtggcaggtggctccagggttcccgggcctggctggggctccccgacacccggagactccccgtcattcagcagaccaggggcaggacgcgcgggaacgagtatcagccaagcaacatcaaacgcaagaataagcatggttggatccggcgcttgagcacgccaaacggcgtcc

SEQ ID NO: 2531 - DNA, 429 bp, Bos taurus
  Clone ID: 05-LIB3058-052-Q1-K1-B9
gtcagcttcaactctgaaacactgttaagtgcgttacaaagttcattttatgaaagcactcttgtagcatgaaaatttgtagagctacaggttagctaccagagcttgagcttttttgttgtttttttctttacatctgagatttctttttctaatccactgaaattattgtgtactaaatttgggaagcaaatctattctaactcattaacccagttgagatttaggtctgtcatcttaatatatcatgcagtaaaaggaagactcttcacaaagaaacacacctttcatgctatgccagcattgtcctgcttgtgccgatgatgtgattaaatgtagagaatttgcttaaatttaacctcagagtttatcacacagcttaatgggtctcattgaaatattcaataattgaactgcaaatcactttta

SEQ ID NO: 2532 - DNA, 239 bp, Bos taurus
  Clone ID: 05-LIB3058-053-Q1-K1-B9
catttgcgcccaagatgagctcgggccggatgcgagttgtcccatatgatgaaccttgaaatcatgcctgtagtccgcagccaaccgtagcctaaggcggacttcatgacattatgttcagctcctaactgacacatagtgtacgagggcagacattaactctgtatagacttcacactggtgccaccagatataaccaaatgatcagacacttgaatatgtaccgcacttgtgatggg

SEQ ID NO: 2533 - DNA, 350 bp, Bos taurus
  Clone ID: 05-LIB3058-058-Q1-K1-B1
tctgcgcaaccaacaaagctagtatcagggatgccatcattatacaaaaactcaactggaaatcaagctttttgtgagaagaccattatatacgtggtgctcttgagtgattctactttctactggacgcagacttgtcttgaccagtaatttattaatgagtgacaggtatatgctcgagggcaccgcagaagacttttgcactctttctgggttccctgtatagctctattttcctgaggacacataacatttaagatgattgtaaacacgacaaaaaaaggtgaatacattcctgtgactgacatctggatactactcaagtggcaagtactaacaaaatgaatatt

SEQ ID NO: 2534 - DNA, 336 bp, Bos taurus
  Clone ID: 06-LIB3058-001-Q1-K1-B5
tcgtcgggctgcgcacaccctcacgctgctctgccttaaagccttggggtctggccggtccctggcctctgcacttgcccaactctgcccactactcccagggccgcggggtgccccgggctgccaggaccgtccgacctcgtctggcacgacctggactccccacgggctgagctcttacacccactttggatggcggctgctgccggccttgggctgaggcgaagggtgggtactcaagtaacaactgtgatcatactacaatgaatatcattgagagcacatagattatatagatcatgaccacagttaccaaatttccgggaaaaatatttt

SEQ ID NO: 2535 - DNA, 296 bp, Bos taurus
  Clone ID: 06-LIB3058-003-Q1-K1-B5
atcgtaagcggcagtccttcatagcatgtaatgagatgatcttggttttgcacagaaagatgcacattatggctttaacaactagagtctcaatacgatggggtagaaccagagagggctggaaaatgatacattcataatgagtctctgacaaatgaaaattgtacattatacagcgcagatgatatatcgaattcgatacgtatagcatatgacgcaaaattactccgagaagactggtctgaggataagcagatgtattgtgacggaagatcagtatctgtcaaatagttgat

SEQ ID NO: 2536 - DNA, 327 bp, Bos taurus
  Clone ID: 06-LIB3058-005-Q1-K1-B5
cggacgcgtggggtgaggtgttgcttttctcccagtgagagactggggtggcattgccctctgcacacaggccctgccaggtcccaggctccatgctgctgtgcctaggtgacaagcagcaggacacctggtgtcctgatttgtggcagatggcaacaaggctgactgtccaccccaccccacgtggccagatgctggccaaagggctgtgactgaacctgccaagcggctgagaccctccaaggcactgggatgactggcaggcactctggtcacaagaccagctctgccttttctccacgtggataggcggttgacttatgaagc

SEQ ID NO: 2537 - DNA, 137 bp, Bos taurus
  Clone ID: 06-LIB3058-005-Q1-K1-B9
gtatccacgcgtcctgtgagacagtatttatggcgactctacgacagcactacggataggccagatagatcaccactaccgtgctctctatgccggctctccaacctgatcaccgatgaaagccactgctataatga

SEQ ID NO: 2538 - DNA, 181 bp, Bos taurus
  Clone ID: 06-LIB3058-006-Q1-K1-B5
gactgcccgcgtgaccgcgagccgcttactgacgagtgtcctgcacaactggctgggtcgctacgtgcagcagctgcagcggctcagctttagcctcagccgtgacgcgcccttcgtccgaggcgccagggagtacgtggaacgggaggtgaccgacttcgtccgacggaatcccggggtc

SEQ ID NO: 2539 - DNA, 429 bp, Bos taurus
  Clone ID: 06-LIB3058-010-Q1-K1-B5
ttgaaaatgaatttaagtggagagagctggtgtcaggggaatggaaagtgaagtggagaaagacagaaccacaggtggacgaaagcagcgggggtctgcccctacccggtagcccagtgtcggggcaggggatgcaggtcctgtggggatgggtggggggagccacagacctcactttacccgccctgacccaggccaagctgaagtccttctcagccaagatcgtgcagctgcttaaggagtggacggaggccttaccctttgacttccaggacgagaaggccatggctgagttgaaggccatcacccatcgggttacccagtgtgatgaggagaacggcactgtgaagatagccatcttccagatgacgcagagcctgctgctgtccctggctgaccggagccagcttcaggagctgctggagaagc

SEQ ID NO: 2540 - DNA, 433 bp, Bos taurus
  Clone ID: 06-LIB3058-011-Q1-K1-B9
gcctgccgtccggattcggtcgaccagcgtcggtctagatcgcgagcggcgcccgatctacaatttggaccaatggcctactggtctcaagccaagttccatatatgttttattctttgctgcactatgttttctgtagcttgtcttctctgtttggctatcattgttggctagtcagcaaaaataaatctacattagaggcatttagaagcccatatttcgacatggaacagataagaatggattcagcttgggttcagaaaaatatgctccagtttttggtgatgagaagaggtactgttgctacccattttttcaagtctggtgaggctgctcctttccaacttgccttgtaaccaggatcctgagcaaccatctactcctgcaggattgaattcatcatctaaaaatcctgaaaaccatcagtttcctg

SEQ ID NO: 2541 - DNA, 229 bp, Bos taurus
  Clone ID: 06-LIB3058-012-Q1-K1-B5
ggggagctgaagtgcggggcttgttgatcggcagccgtcatgctgagggggtatcactttgacgttctccgtaaacctggcatccctgctcacctacctctactttgctgtctcggcattgaatttaagaccatgaaaagcacgcggcatccactggtgtgtacatgaaggattcaaagaaaatgaacgcgcatggtgacagtctagggtacatgttgacattgctcat

SEQ ID NO: 2542 - DNA, 392 bp, Bos taurus
  Clone ID: 06-LIB3058-012-Q1-K1-B9
caaatctgtggcctcaactgcctctctcattcacccacctataaaggtagggaatcaggggtggtacagaaatctcgagcttgtgaggccaaggttccgcagtaatgcagtgctttggatggcataagaactgagtcagtctgtgattcttggacagcctggtcctttgtagagggagaggatcccggaactgtgttcaggggatttgggcgagggaggaggtcttccaggaaacacgacctcccctaagccgcttactctcacctgcagcccgctccccactctctcccagctcctgtggcagccccctactggcttgcctcctcctcactctcagacgtctccacttctgcctttggtgaatcaaatcagtggttatgaccactgctact

SEQ ID NO: 2543 - DNA, 444 bp, Bos taurus
  unsure (426): Clone ID: 06-LIB3058-017-Q1-K1-B5
cttggagaaggccaaagcttgtctccagaccacggccctcgacagtgaagttcatctgcaggaagccatcagatgcagtgggcggccagaggaggagctgaacaggctcatgaaattcgacatccccaacttcgtcaacacggaccagaactcctttggagaagatgatctcctgatttctgaaacacctattgttctagaaaataagccaggggtccaaacctcacacaaagagttggactgagaagcacattttatcaggcattttcctgaaaatgttgggtttgtcattgagttaccagaaatcggtattcatcaaaattgtgtgtgtgtttgtgtatgagagacagagacagagagaggcagattggcagagaatggaaccccctgagaagaaagatggtgaaactgtagttttcatgcgtntaaacatatttggagctt

SEQ ID NO: 2544 - DNA, 326 bp, Bos taurus
  Clone ID: 06-LIB3058-020-Q1-K1-B5
gatactatgacaggctgaggtcagaaggcctggtgaggcggtgggggccgcagccatggctcgcctgtacagcccccgcaggggcccctcttctctaggggcctgttttcagattaaagctggagcaggggttgatgttccctttccaggtaggcccatccccactttcaagctctgagagggaatttatggcaggaattaggaggcttttgtggaagaggaaaagtgaaagaactcaaatctttaaggaagctaccttttaaggtagtttttgggttttcttttccccctaatgcactcttttaagcaagcagaataacaacaac

SEQ ID NO: 2545 - DNA, 283 bp, Bos taurus
  Clone ID: 06-LIB3058-030-Q1-K1-B5
gttctagatcgcgagcggccgcccttttttttttttttttttttttttaaatgaaggccctttactccatgcctctcaaactatttacagcactcaaggaaaactgtttaccccacgtgtctccaaagggcgttgtgcagggtagcggctgctctccggaccctggacacccacaaggggtcccttccccgaacccgcgcatcccccacggcctcggtcagctggctattcccggcccgggctccaccatcactggcgcttgcttctcttcttggtgctttta

SEQ ID NO: 2546 - DNA, 197 bp, Bos taurus
  Clone ID: 06-LIB3058-030-Q1-K1-B9
cttattttttcttatcctctcatcattgaggctatgtatgaatagagagtatacaaagccgacacgaaatagacacaatgaaaatgggattaaagagccatcaatccgcgtcaccaagactcatactcattttcagcacatagggaactgtgaagaccactataagaccatcaacccttatgaggctgatgcatatg

SEQ ID NO: 2547 - DNA, 106 bp, Bos taurus
  Clone ID: 06-LIB3058-031-Q1-K1-B5
ccccacgtgctgcgagcctcggaggccccctcccctgctccccgtcgtgaccttcgctcccggctttccccatctgcccacagccaaccccaccgggcctgggtag

SEQ ID NO: 2548 - DNA, 451 bp, Bos taurus
  Clone ID: 06-LIB3058-035-Q1-K1-B5
gacccactcggccgacggtatttggactacagatgtcggaatagaactggctatggccttcatcagggtgggtgggatctgcctctgcctctacttcctgtttctgtgcttcatggtctttcaggtttttcggaacatcagcgggaagcaatcaagcctgccagccatgagcaaagtccggcggctacactatgaggggctaattttcaggttcaagttcctcatgcttatcaccttggcctgtgctgccatgactgtcatcttcttcattgttagtcaggtgactgaaggccattggaagtggggtggtgtcacagtccaagtgaacagtgcctttttcactggcatctatggcatgtggaacctgtatgtctttgctttgatgttcttgtacgcgccatcccataagaactatggggaagaccaatccaacggtgatctgggtgtacac

SEQ ID NO: 2549 - DNA, 429 bp, Bos taurus
  unsure (354): Clone ID: 06-LIB3058-038-Q1-K1-B5
cgcgggacgcgttgcggattcccgtcgtgttgctcctgcggtggggaggcccgcaggcctgcctgggctcggatagcctggagcgcgggcggtggcggcggcagggggccttggacgggtcaggagcttgcaaagctgctccgagtggggacgtggaaccactggatggaaagtcgagaaatactttttaaagcattttgccctttgcaaaaagagttgagcgctcttcctcaaacgtgctgtgcttttttgcgccccctccctcaaatcgttggtttctctcccactatcctctgcggacagagcttaggcacgtttgtttgttacctttggagagcaagtagataaggcctncctagcggaacacccgctttcagctcgggtcctcactgtaaactgacatttcctcttcatttccagttattacat

SEQ ID NO: 2550 - DNA, 362 bp, Bos taurus
  Clone ID: 06-LIB3058-039-Q1-K1-B5
ggacaattaatggtatatgctccttatttcactgagtaaagtcctattcttttctccatatttgcttgctggcaaaattgacatttacagcctgctatttgcttataattgagaatgtgtgcaaaaatatcaagctcgtttcctgtgcagtatgaaaacttttgtgactactcacaaatacatcagcttgctctggtctctctccttatatagctctattcttagaaatataatttgaatatgatctttgaaattgtgcagattgttgctgtcttgtgaaagtattctcaaacagaaaaacataactttgtcgtcttgatatttcttggtctagtaataactgttgtacttgacatcttatg

SEQ ID NO: 2551 - DNA, 431 bp, Bos taurus
  Clone ID: 06-LIB3058-040-Q1-K1-B5
agtggagcggcttcgcgtcggttgctttggtacgtggcaggcgggcgggcaggtgggagtgtcccgtgtggtggccgcggctcacaccccggaggagccggatcggcgcgtgcggagaagggacgcggtgcggactcggccgggcctcggtgggtcccgcgacggcgcaggcgcgcggggaccgcagctgcccccgcgacgacctactttctacggagcccggccggagggcggaggcggcgcagctcagagcggtggcacgacgttactggagcctcgcggaggccgtggctatcgcgagagcgaaagtgacaggtggcgtgctcggcacgccggtgcgcacagagaacactaacccctggggagagataaccaccccacctgctttactccagaaactcactgaccaacacacttgcttttaccgaaac

SEQ ID NO: 2552 - DNA, 340 bp, Bos taurus
  unsure (33),(54): unsure at all n locations; Clone ID: 06-LIB3058-041-Q1-K1-B9
caccctgctgcacagggggggcgcctactgacnctgcaacaacctgactaaggnacaggagagctgggggagggccgagggagcacgcaccctcagactgccagagacaggcccaacgggaccgacctaggtccgcttgcctggctccccaccccccagcaatggcgaatgctgcctcgagacggttccttgggctccaaagcccaacactcgcctgagccgctcctgggccctgagggagctgccggatatcactgccccgacttgccgacactcagctcctgggccccccctgcccccaagagctgttgacggagacaccgcacgagcacacactgcg

SEQ ID NO: 2553 - DNA, 146 bp, Bos taurus
  Clone ID: 06-LIB3058-044-Q1-K1-B5
atgaatttctgtgcggccttcctaccttttaccttcagctgcacaggcactcatggcgagatcacgtccactgcaagccaggaacctagactgccccttgcccggtcggccctcaataaacattgttatgcaaaaaaaaaaaaata

SEQ ID NO: 2554 - DNA, 432 bp, Bos taurus
  Clone ID: 06-LIB3058-052-Q1-K1-B5
gaaaattaaactggaagagaattttaattcgccatcgagaagacattccttttgatggtacaagtgaggacatggagagacaaagaaaattttcagtttttgaagaaaaagtattcagtgtcaatggagccagaggaaaccacatggactttggtcagctgtatcagtttttgaatgccagcgaatgtgggaatgttttccagatgttgtttggtgtggaaggacagtgagcaggggagtggctgaaagcgttttgccactgttggtcttttgattttccctctcttttgcttgaaagattaatttgactttagtcccactctagaatgttagggaggaaaaaaaggaaaagcagtgtagcagaaacgcatctgttaaaaaaatatgtcatgattagaactgagttttaaagtataatcttaaactttgtga

SEQ ID NO: 2555 - DNA, 258 bp, Bos taurus
  Clone ID: 06-LIB3058-058-Q1-K1-B5
cgtccggattcccggtcgcccacgcgtcgggacgctggcgaccacctttcggtttgaacacatcctggttgaaggacggtatgttcaacaggaatatgcacacagaataaactgcatgcagaatttgactgctgtgcggactgctgaggactgcttaaaactaaatggtagcaaaaagtgctgaaagcgctgtctcacagtacctttgtacagtccaaataagtttaagctctggctgctcatgagcttggttgaact

SEQ ID NO: 2556 - DNA, 428 bp, Bos taurus
  unsure (326): Clone ID: 06-LIB3058-058-Q1-K1-B9
tcgggcgcgtggggagggaccgcaccgagtacgcagctagcgcgatggaccgcccagggcgacccctagcccgcgccctcttccacggccgcctgcaccagtgccctgacgagcggttcgtccaccggttgccggtagcggaacttcaggtgccgcagccccttgccgctgccttcgagttggggatactggccgaccagagccgcgccctggaagaactgcaggttcgcgtgggtcttgtgcgtgacgatggccagcaggttctgccccttgaacccgaacaccaggttgccccacttgacgctctgctccagcgcatgcgccgnctccaggacggccctttgcagcgcctgcaccgtgatgcgctgttcgggaggcaggttgtcgaagtaggccgccaccaaagcggcgggtcgcacgggcgatct

SEQ ID NO: 2557 - DNA, 384 bp, Bos taurus
  Clone ID: 07-LIB3058-001-Q1-K1-B3
gccaaactgaaccagtgggtcaccagtgtggtctctttcatagagaactattcaggataaatcttaaaatcaccatttgtctctaagtattttgagatacagttttattctgattcttcaatgacttcctaaaatgtctttagcaaacataaagctagaagacccatgctgacatatttacagttcgaaacaatgtgtcaatacccaacactttcacaaataggtgttactcaagtaacaactttgatcatactacaattaatatcatgagagcagagagtttatatagatcatgaccacagtaacaaaatatccggaaaaaatatttttcaattgattcccaaaagggtttgaaaaaattcccaaaccctttttgtgggggcc

SEQ ID NO: 2558 - DNA, 423 bp, Bos taurus
  Clone ID: 07-LIB3058-003-Q1-K1-B3
acgcgtccgatcgcgagcggccgccctttttttttttttttttttttttcttttttttccacagcaccttccattttattgttttatttacaaacagggtgaagtcaactgggaaaatcggggtaaggagtcagtctgggccatccaaatgtggagtggttcctgggtcaatctccaccatgaaggccgcctcgtctatctttttcctgccccttagtaatggccccttgattcctcagggcagacttgtctgctgctcctgagcccttttatgagggcagatggatcctgggggaacaggggtggtacgagggctggggccccctcagtttgtgtaaacctgagttccgatcacacgcatgatttccttctgtatcttggggtcctgagtattaatgttggcatcgcccacctgaccatcct

SEQ ID NO: 2559 - DNA, 96 bp, Bos taurus
  Clone ID: 07-LIB3058-005-Q1-K1-B3
cggtgagagccacgcgacccatcatgtgcgtccagacctcagcgtgagctgctcaagagcagtatcactgacgtaagcagaacactttaagtcatg

SEQ ID NO: 2560 - DNA, 378 bp, Bos taurus
  unsure (302): Clone ID: 07-LIB3058-006-Q1-K1-B11
aaaaaaagtcctcatgggttacatggtctgctcaacatcaaaacgctaacaggtggcagagcacaacggaagtcgggacctctgtgactctccctaatccgctctccaccgtgatcgcagttttcaaatcgtgctttgtagttctgcagggacatttcagcaattccatgttgaaattgtattttacactctttaaatctctattagataacaggtagacagacacaagtgtgctgatatccagattttaacatactggcatttgccagcaggctcactgttgtttccagattgactcattntgtgcagaccttggaaaaaagattccctggtgagatccaagcacacagcttaacttctactcattcttcgtagatt

SEQ ID NO: 2561 - DNA, 156 bp, Bos taurus
  Clone ID: 07-LIB3058-006-Q1-K1-B3
gtcaggggaagccaggagaagaaacatgggcccaggtacaagttcgggaaaatctctgcccttctgcttcaggctctgccctgcctgcctgcctggtggaaaggtctttcctttggttaatctgagagtcgaaggaatccctttcacctgcacatt

SEQ ID NO: 2562 - DNA, 191 bp, Bos taurus
  unsure (1),(38): unsure at all n locations; Clone ID: 07-LIB3058-007-Q1-K1-B11
ncttccgcagtctgcccgcagcggacggggcatgcggngaggagtggccggggccccggctgactgggcaggaacatgaccgtttcatgggacacgtgggagcctgagggaccttctgcctcagagaagccagagtcagggagacaaagcgcctccttcgactgaaacgtctcaataaacatttccaattt

SEQ ID NO: 2563 - DNA, 423 bp, Bos taurus
  Clone ID: 07-LIB3058-013-Q1-K1-B3
aaaaaatgttaaatcccagtttgttaatggaggtctgcatctagtaagactcatctcttagatagttatttgctgttatgtgatattaatgtaaaatttaattgaattcttaaagaacaccctaagtttgtttctgaagcttatctcagtaatctatctttggatgaagatcagatgcctcatgacctgcaaccaggactggaaaaagacataatttaagggactgtctccaacctagatggaaggacttttttaccaggtacttacaggagacctaacaggatggtcatctctggtccctggaaacagaaggcaacatttggggtgagggttgcagggtttgtgaccctttttgattggttggtggtgaggcaatagaactgtgctccaggaatcttgggttcagtctgaagttaccatcct

SEQ ID NO: 2564 - DNA, 111 bp, Bos taurus
  Clone ID: 07-LIB3058-014-Q1-K1-B3
cggtcgcgtgggtcgcgagcggagtcatgtcagttcttgttccagacgcttcaatggggatagtcatacctgttttcatgattgaataggtgcatgctcatgtttggcaca

SEQ ID NO: 2565 - DNA, 428 bp, Bos taurus
  Clone ID: 07-LIB3058-015-Q1-K1-B11
gttttacgtgtgttttactgatttaatccatatactgaggtgaatatactgcttctgcagacagtaaggcatagagaaatgatctaattgccccagggcaccagctgggcagtgacacagctgaggttcggaacaagacaaccagagtcaggaacctgtgctcctaccagtgtcaaaacttctggagtctctcctgtcacttcctagctgttcacttcctagctgttcttttttatttttaactttttattttgtattggaatatagccaattaacaatggtggtttttcaatttttaatataattttcataatttaatgactttttaaggtttcttcccttgaggtgtcacttttgggccacttttggggattaaggttaattttaattctaaggtttaatttcaattagaggattaatgctttaca

SEQ ID NO: 2566 - DNA, 187 bp, Bos taurus
  Clone ID: 07-LIB3058-018-Q1-K1-B3
gtgattatgaataggcttgaggcccgaaacttttattctttttatggggtaggaaaaagaataaaagtttctggccacagcttctcgttctggaatgatgtgattatgaataggcttgaggccctgtcttttggtttactggaactgaaacctgacaattttattaaaagttgtattatttcatggg

SEQ ID NO: 2567 - DNA, 263 bp, Bos taurus
  Clone ID: 07-LIB3058-020-Q1-K1-B3
ttttgatcttttggtattatgctgataaattctaactcaaattcttcatcttattatggtattctgctgataaattgtaactcaaattcttcatcttattattgtatttaaattgtacagttaggtgtattttattcccttctgactttgaagtatcataatttgtatgttttacatgaagtttgctgtaatgccaattaaaaaaagttattcttcatgtagaaaaaactcaaaatcttaaagaagctaccttcaaaagaaaa

SEQ ID NO: 2568 - DNA, 458 bp, Bos taurus
  Clone ID: 07-LIB3058-021-Q1-K1-B11
cccgttcccattctagaagcagttccgccagctcatatctggatggggcgctcgtccatgttttctacaccattctgtgttgttcatgagggcatcaaataatttcatttagccagagtttgagactcactgaattttactggcatagataaagagaggatgcctgtgggttatagagacacagcaagtccagggcctaacccgaaaaataacaagcctggaggaagtcacttctcaccctctcgttctgaggttcctgttgctccttcctgttgatggaggaggatgaggggctggaggtgagaagccctggacccttggggagtccttacccccctatactcccccagtgaacttgctaaagacaaggggggcccggccgtgctctgagtgctgagggagcccagtgcctgcagcgaccctgccccggggttgaggtggatgtcaacagacaggcc

SEQ ID NO: 2569 - DNA, 407 bp, Bos taurus
  Clone ID: 07-LIB3058-023-Q1-K1-B11
gttctagatcgcgagcggccgcccttttttttttttttttgacaggctgaaaaagcaggaatggtttatttacaatgatcatttggtaacacatagatctttgggcttttagtgaccttgttaaaagacgtgtgggcaggggcccgctcccccggtggcgtcaccgcactctccggcctcatcttgctgtgagcacccaggtgctgtcaggaccctccggctctgacaagccttggcttggggacatcgctcccctgtccatttgctgggtggtcagtgcctcaaacacctgccagatgccctcttacctcccttggaggccacgtcttggtcctagctgtggggcaccgagcggggacccacacacatttgtatgcagaaagacagggtgggtgaggggtcctgcg

SEQ ID NO: 2570 - DNA, 331 bp, Bos taurus
  Clone ID: 07-LIB3058-023-Q1-K1-B3
ggagaagagcttgttctcatgggctttgttggtaccttcagaaacttttaccaaagtcgtgtttagctgcttgtggcggcagccccccgaaccgctgtgggtactgggaggctggactggcggctgagccgtaggggctcatgctaccacgcaggagagactagtcccaaaggtggaccctctgggtcgggggttgctcttctctgagggctagtgactggcccagattgcacgtgtgagcggaggacctcaaggggtatggaggaagcccaacgggccgtggccacacagggtggcctttcaggacagtaagcgcggggcgttgtggaag

SEQ ID NO: 2571 - DNA, 223 bp, Bos taurus
  Clone ID: 07-LIB3058-024-Q1-K1-B3
tcgtccgctagatcgcgagcggccactcttcgttttcggttttctctgcagcatccatagcaaggccacggggctctttgaaggggccggaggctgggtctaccacccgtatgctgcaagccaagggggggagggctgctgggggagattggccctgactgttgtaagaggcgatgccatcccatggtggccccggttggcatgactgatgtggagggagtgc

SEQ ID NO: 2572 - DNA, 439 bp, Bos taurus
  unsure (382): Clone ID: 07-LIB3058-025-Q1-K1-B3
ggcagctggcagcctcctcggccccatgtcagacgttcacaatgctggcttccttagagagcctggacctcggttagctcttctgctttccctccgcctcgggaccagctacaggcttccatgtgtggagaggccccggccacaccccggccctgcgctcgtgggctgctgtcccctgcagggcccatgtctacttggtgtgagccttgtgtgtgtgccggaaagccttctgctgtttcccagggggcgtgcaggacataggagaccctgaagatgcacgcagagctccctgaccgcaattcgggttcagggtggccacggggagccccggggtccggcgctggctgcagggccctgccaccaccggggcctcacacctcgncacccccttccgccaggcctggaacccgcttgggtcaggatgctgttcttggaccca

SEQ ID NO: 2573 - DNA, 192 bp, Bos taurus
  Clone ID: 07-LIB3058-030-Q1-K1-B3
tcccgggttctcccacgcgtccgagaaaccctaaagataaaccaactgacctattggcatcttacctattaattgcaattttaaatcaggattttactttggaaaaagttaagttttgtggaaaatctgacttaatcgtcttgccatgcaagaaagaatgattaaagcactgtttcttaagtttatttattt

SEQ ID NO: 2574 - DNA, 423 bp, Bos taurus
  Clone ID: 07-LIB3058-035-Q1-K1-B11
tcgcggacgcgtgggtcttaaagcacttcctttcttaaccgatcacagtggagcggcttcgcggcgggagctttggtacgtggcaggcgggcgggcagctgggagtgtcccgtgtggtggccgcggctcacaccccggaggagccggatcggcgcgtgcggagaagggacgcggggcggactcggccgggcctcggggggtcccgcgacggcgcaggcgcgcggggaccgcagctgcccccgcgacgacctactttctacggagcccggccggagggcggaggcggcgcagctcagagcggtggcaggacgttccgggagcctcgcggtggccgtggctatcgcgagagcgaaggtgacaggtggcgtgctcggcacgccggtgcgcacagcgaacactaacccctggggagagataaccacc

SEQ ID NO: 2575 - DNA, 410 bp, Bos taurus
  unsure (50),(307): unsure at all n locations; Clone ID: 07-LIB3058-040-Q1-K1-B3
attcccgctcagacccatcgcgagcaagtaagttactccactgttcatgnatacctggtatactcgtattttgggggtatggtttcttagtaagaattttgacttctggatacccttaggcttagagaatcagatatgagaaaactttaaaagggttgcagctttttccaacaaaaatcatcctgtaagttgtgtttcttaattttttaatacctttagataagagtgtatcgtgtaatttattttctaatataaatctggacataaaataaggatgaagtacttcaagagttctacccatatgttntcttgtagactcatagttctatcattttgaatggggacaaaaatgacttatgttctttttttcctgacataataaacccttcttactatttttatcataagat

SEQ ID NO: 2576 - DNA, 428 bp, Bos taurus
  Clone ID: 07-LIB3058-042-Q1-K1-B3
cttgctttatgtttatgataatgattgtcttttgagtttttttcctcttatttttttactttgaactatgtacattggaagggtcaggaaaaataatcagtagttaaaggctagctttaaagttcagttttgcttttcctggctttttaggaatcaactaactgtaatggggtcttgacagtatcacttgcagttaaccagaaaaagaaactgcatgtttgtttgtttttttttaattaaaaaaagcttactgtagaaagtatttgggaagtatagaaattagaaacagagacagctgttgtcagtgttcttgtttatttccttccagctttttcaatatttttaataacattgagagcttattgaatttagttcagtgttttgtttaacttaatattggatcataaatgatgctttgacgtgttaaa

SEQ ID NO: 2577 - DNA, 340 bp, Bos taurus
  unsure (194),(204),(228),(264): unsure at all n locations; Clone ID: 07-LIB3058-043-Q1-K1-B11
cggacgcgtgggcggacgcgtgggcacttttaataccaaaaaggcacatcaactgaaaagttacacttagtttggaaatgcttttcttgatttatggttaaaattctgttaggatactagatatatcagactcaagtgtcattgggaattaaatggatttactgataagaatcagtccttagtcttccctttgntatatggttntacaggttatgattgatcagactntgtttttactaatggtaagggtgagtgataaagcangtttgaaggttactggtacttgtgaaaaattcaaggtttggctatttaaatacctaacccttaaggtgattaaaaa

SEQ ID NO: 2578 - DNA, 362 bp, Bos taurus
  Clone ID: 07-LIB3058-047-Q1-K1-B3
ggaccgttgaactaagacctgtttcctttatggtcccaccaaatgtgtatatggggagattcctataaatatcttatgcagacaggctgggcttcagcctggtccagctacatggcaaataccccatccatcatctggagaccatgatgttgtaagcaggtgacccatagaacctgagacagggcctggcatatcccactaggccacagactgacctgagtttgcggttacttactgcacatgctcggatctgaactcacctgatagctcactgatcaatgacgccataaccctggcctcctaatgaagcccttattcctttacctacccagccccatgcccccaggggtcatgcccacgct

SEQ ID NO: 2579 - DNA, 447 bp, Bos taurus
  Clone ID: 07-LIB3058-051-Q1-K1-B3
acggggcctctgccccagcaccttcgctcttccattagtctcaaagcacaaagaagctcgggccaggaggaatgcctgctccagtggcgggaacacttgtcttccccaaccagcctcccgctgatgctggccatgtcccccaggagctgctggagatggcaagagcaggctcagggctgctggatccacacccaggagagatccacagactgacatgacctcaggttcccacgtcagtggccaagagcaggggccacctgggaaaagtgttcaggcatggttgatggtgggtttatgaccaatgaggcctgcagtggagggagcctgaggggccttggccaggatgattaaagctgccatcttgacacgtctcatctctgaatatcagtgggagggtggggacagaacctgcagggtttgggatcaggtcccatgactgaggaagaa

SEQ ID NO: 2580 - DNA, 258 bp, Bos taurus
  Clone ID: 07-LIB3058-053-Q1-K1-B3
cccggtcgaccacgcgtccggcctggacgagctcgggacgaacactgccttaactgcacatgtgccgaggctccggaattgcatagccaacctgctgggaatgaacttccacagatagctgcccagggccgatgcctcagaccctgtgctagaggaaatgtggaaaaacaaccagacgtaacatttggaccacgggactgcaagctgataagattgcccgtatgactcatgatgcaccaaatgacagtgctgcataca

SEQ ID NO: 2581 - DNA, 380 bp, Bos taurus
  Clone ID: 07-LIB3058-054-Q1-K1-B3
ctagccagaggccagaatggaacctttttgctggtgtgcctctgctgagatagtgctggatgccagttggccagactcaggaacatttagattttgtttctgagaggaagcagtgcatagccataagccgcattaagttcattaggtgcaaatgctacatgacacagttaatatggtgacagaaataaactcttcagtgactcaattctagtggcaccaattttaaccaatttatcagacaattgagtatgttctgcacttgggatgggttttaaaaatatggtgtccattttcttgtttggcttacttgactttgcagagccagtttagtttatgaagatgcagatatgtattcactaagcatgtcagcactgataggt

SEQ ID NO: 2582 - DNA, 326 bp, Bos taurus
  Clone ID: 07-LIB3058-056-Q1-K1-B3
agcggccgccctttttttttttttttttttttttttttttatgtttgtggtgaatgggactggaacccatgaggtggccctgctcaagggtaggacgcacacacggagccaaggagacctgcaaagcccggtaaagccagggtcctctcaacaggaggcccttacactggagcggaaggccttccctgctagagccctcaggagctgagaaagcaagagagggaactgctcccaactccccttacgccagcggcccttcttcgtcactgctgaaaacagaccctgctgcccaaaccctgccccacaccccggggcaacgcagggca

SEQ ID NO: 2583 - DNA, 133 bp, Bos taurus
  Clone ID: 07-LIB3058-057-Q1-K1-B11
gatgatttgtatgatactttgtattcatttattttttattactactaatatattttaatataattgtgttttttataaatttgtatcatttattaattttttatactatttatttttatattttaatttttta

SEQ ID NO: 2584 - DNA, 263 bp, Bos taurus
  Clone ID: 07-LIB3058-058-Q1-K1-B3
tcgaccagcgtacggagaaaccgcccagatgtggagtttgtgtcatcctcgacactgacaaggggcgggatgaaggccacctgtgtctatacgccggatagggaggaacggaggagtacgcgccgccaccaggacacggcgttcctagtcagagatgagggaggttgttggaggataccgaatacactgttcctagggacggcagggagctatgagagagtgggtgtggagaacctgatcccatgagagggtatagggcatga

SEQ ID NO: 2585 - DNA, 289 bp, Bos taurus
  Clone ID: 08-LIB3058-001-Q1-K1-B7
tcgcggacgcgtggtcaggcagcctgagaattggatcatcctcatggtttggggcggaagccttggcccctccaacccgtttccatgctgcctagcgaagggaacagaggttctctgtgtcgtggcctcagtgtggagagagggcccggtctagagctgcagtcaggcgggactgtggggagcgcccccgggggggcctcgggtagtcatagggtcgcagcgcttcaaggacactttcctggaggcagttggagagtcagagccattggcccatattcaccccttagag

SEQ ID NO: 2586 - DNA, 425 bp, Bos taurus
  Clone ID: 08-LIB3058-003-Q1-K1-B11
atttagctgcattaaaaaagcttgaaatgtccatttactactcaggcttgtactgcatatgaaataaacaaggacagttaaaaatgtggccttggaaaaattcaactgggaatacgcttggggtccgggcaaaaaaccagaacaagcaaagttacatcaaactgtctgtcaaacagctaaccagacttctacgtgattaaactgttgaaaatgttttttcttctatctcaggaattctcctatggcatggaaactcagcctttctctctttagacaaactcctaggggttacctgtaccgtgtgtgccatgtgcaacacgtcacttcacgtgtttcgggttgttggaagttttagactggctgcatttgtcctgaaagcagcatgtttagtctccggccataccaccctgatcttgactgatctt

SEQ ID NO: 2587 - DNA, 438 bp, Bos taurus
  Clone ID: 08-LIB3058-004-Q1-K1-B7
cggacgcgtgggttttttttaagcagaaaccagaaatcagcatttttatagtacaatttcatattcatgacagcaaattctagtttttaaagatacctatccttatcagctgattacatattaagatgactagtagcatttctttaccatatatgacataagagaaaaatgtgtatcagtaaacaaagatttttaagatgtaggcttatcaagagaaggattaacaaattttttttaaaaactagaaattcatttaagaagaaaaacaggtatgaaataaacatttttaaaactggaaaaattgttaaagacaggagaaatgatacaaaatcactttgagaattttttatgttataatagaaactaccaaagtgaaagaggttaagtaatcactgaataattatgtttcttataagaatacagtgccatgtattaata

SEQ ID NO: 2588 - DNA, 422 bp, Bos taurus
  Clone ID: 08-LIB3058-005-Q1-K1-B11
aaagcgcgtacccaggacattctcagaggcggcggttatggtgcgcactgggtcggtggagagctcgagctaaagggtgatctgctagagagtgatctctaggtgaaaatcagaaaggaaatttactataatcaagcatgatggatccatgttcagttggagtccagcttcgaaccacaaatgagtgccataaaacctattatactcgtcatacaggtttcaagactttgcaagaattgtcatcaaatgacatgcttctacttcagttgagaactggaatgacactttctgggaacaatacaatctgcttccatcatgcaaaagtttacatcgacagatttgaagatttgcagaagtcatgttgtgacccatttaacatacacaaaatactagccaaaaaaaatttacatgtaattgattta

SEQ ID NO: 2589 - DNA, 409 bp, Bos taurus
  Clone ID: 08-LIB3058-005-Q1-K1-B7
gccgggcgagaggatagggcgcggggaccactgtgagcctgcggagtccggtgacgaggcgggaatggcggagggtggaccggattgtgaaatcggggtgcgtttgctccctgatcactggctgtgttatcagtgggtgtgggttgtgccctcttaggaccacatagattattaaatttacggcccaatccccggagaggcttatggaaactaacatcagtaacccaaccccaatgactattctgcgtccttcctagggcgcatttatgctttccacccaccctctacccttgctctccaggaacgaactcctggttcctggggaactttctcggcaaacccagattagagaggccacttgcctcaaaggtacaactggcctgaactaacgtggaagccagaaattcac

SEQ ID NO: 2590 - DNA, 169 bp, Bos taurus
  Clone ID: 08-LIB3058-009-Q1-K1-B7
gagaaactctggttactaaaattattgaaaatgtgcagtgtgatattctgcgaataccaaggccttgccttcgtctctcctgtgactaacacaatgagctgccatgagtttcaagcctatataataacctatatgtagaacaagacacccaaaacaggaacgcacaccg

SEQ ID NO: 2591 - DNA, 292 bp, Bos taurus
  Clone ID: 08-LIB3058-011-Q1-K1-B11
ctaagcttgatttttggcctctctcagccctttcttttttaaaactaatcactgtattgtgaatgtccatctttttttttttctttttttttaagccaactctctgctctaattttgatatgacttttgggggtaaaaaaagaaatgaaatgtgaagggtaaactccattgtgtgtggttatctatgaaagttgcacagtacggcttttcttaaactggtgtttttcccctgcatttggtggatttttttttaattattattcaaaagcataactgagttttttaagaaaaa

SEQ ID NO: 2592 - DNA, 389 bp, Bos taurus
  Clone ID: 08-LIB3058-014-Q1-K1-B11
gacaaatgattctatgtagctttgataagttgtgcaatcaatttatacaatagaatactgtccatacatactatcaaactaaaaaacgatagaaatgcagtcattgcatagcataaagcagactaagaagaaatatacacatataatgagcagaattcagaccaaatgttagccatgaggagtctggaagataaaatactcttaataaacacttagattaacaccaagaagatagcatagaaaaaccaagattaacagcaactcagaagtcagagccatatttgttcttagtgtgctatatgctatgcaatgactgcatatctatcgcattttagctggttagtacagtatggactgtttactatgggagaaatagattgcacaactta

SEQ ID NO: 2593 - DNA, 456 bp, Bos taurus
  Clone ID: 08-LIB3058-019-Q1-K1-B7
gaaaaagcgactgaaccgacttcccctttagttccattcttgcaaaaatttgcagaacctagaaataaaaaaccatctgtgctgaagttagaattgaagcaaatcagatagcagcaagatctcttgtttcggtttatgaactttctgaaacaagaaggagcagtgcacgtgttgcagatttgcctgactgtggaggaattcaatgacagaattttacgaccagagttatcaaatgatgaaatgctgtctcttcatgaagagttgcaaaagatttataaaacatattgtttagatgaaagtgttgacaaaattcgatttgatcccttcattgtagaagagattcaaaaaattgctgaaggcccatatatagatgttgtgaaacttcaaactatgagatgtctttttgaagcgtatgaacacgtactttctctcttggaaaatgtgtttactcctatg

SEQ ID NO: 2594 - DNA, 323 bp, Bos taurus
  Clone ID: 08-LIB3058-020-Q1-K1-B7
aaaggtctaaggtgtgtgtggggagagtgttatggatcgagaacctgagatgcttaaaattttctccaatgtgtgaaatttgggatatttttatcaaatgatcttttgtctagagaaaaaacaaagtagtgaagtttaaatgtgccgatctcaattttatcttcattatatttatttgcaaaatttaattcataatttacagaactgtattgtttcttgattttctgtatttgagctgcatctggcatgtgtgtgattcatttgcacataacacattgatttctttctaaatgattttaagtcagaggttaatgagagaagtt

SEQ ID NO: 2595 - DNA, 474 bp, Bos taurus
  unsure (258),(356): unsure at all n locations; Clone ID: 08-LIB3058-022-Q1-K1-B7
tcgcaaaaagaatggatcaagaaggacaagcttgtgaatgggcacaccctgaccagagcctggaaagaagatagcaacaggaaccagttcaatgaccgtaagcagtatgtctccactgaaggccatttcaacaatggcagccacatgacagacattcctttggcaaatctgaagtcttataagcaagcaggaggtgctattgagagtcctaaggagcaccaactctaaaaaaaaaagccatatgggacctaaggactntaatctaaatagacatgctaataccgtgtgtgtcagagctttatgtattcaatagatctctacaactatgccccttagagcagggatacccataattntgtgttggcaccatggaggatacaatgttttatcacataagagagaagatagttttactagccatatgatcttatttactaggattgattaaactttccagaagtatcttcattgtgc

SEQ ID NO: 2596 - DNA, 157 bp, Bos taurus
  Clone ID: 08-LIB3058-024-Q1-K1-B11
ctagcacccagactacactgtggacttccattcgcaactggtataccatgccgcccgcatactagggcaccatccttcgctatcacactctgcaatgccgataaacctgtgccgctggaagagtactggcacagacatactcataactttcataccc

SEQ ID NO: 2597 - DNA, 298 bp, Bos taurus
  Clone ID: 08-LIB3058-024-Q1-K1-B7
cggtcgattacggctcgaccatcgtcggtcgtcaggttcttagtagcgcttgggactcagggtcctgtgtgttggaaaagtgggggaactgggagacacacgtaggtggcgggcagtgctggcctcagggcctgcacccatgtcgacctgagtggcatgctctggtcttcttcactcttggccaaagcaggttgagaggtgtcccagtgtaggcccttgaggtgcctggatggtcactgtctcaaggtggctggtatcagttgccttgatggttctacagccatataactgataatgc

SEQ ID NO: 2598 - DNA, 383 bp, Bos taurus
  Clone ID: 08-LIB3058-025-Q1-K1-B7
cagaaggttagtaactaacagctgccagtttccctgcagttgtggctctaagcactccagcacagccctacgtgtaggagccgtcacctgcccctttcacagatagggagactgagacagagagatgaagtggctgcccaaggcgggctggacttcttgccctgctccaccacaccctcaacccaaccccaccgcaccccgccccaccctcacccgcacgcaccccgccccaccgtgcagttgcttctcccatcagctgggagagaaaggggaagctgggaaggtgcggtaataagtttaagaggattttagcatgtaaagtaattataacagcctcaggtcaggaaagcttagaagaaaaacattggagctaggtgtgagaa

SEQ ID NO: 2599 - DNA, 383 bp, Bos taurus
  Clone ID: 08-LIB3058-027-Q1-K1-B7
agagcccgccccagggatacaacccactcccagtaggtggtggaaggagagaacagcagtcaggagctaaaaccgtacagcacttggtttttaatgtacatgtaaaattttagatttctaaaaccgggggaaaataattttgaacactacgctgtgatcataaccgctagtctcgaggacactgccagctgtcccgtgtcatgtgtggccacccctccatgtactgtcaccgtagctgctctgtttagaccgtgggtagacgctcatgtggagacaggaccgttctctcgctgtctgtagcggccgtggtatcacttttcagatgtgtatattgacaataggtcagaaagtgtatacatacaataaagtctggttctaactcc

SEQ ID NO: 2600 - DNA, 386 bp, Bos taurus
  Clone ID: 08-LIB3058-028-Q1-K1-B11
agttgttgtacaaggaatgaataccccatatcgtcttcatttactcacctgctgagcggcattcacattgtttgcagatgttagctgacataaattgttacaaatgtttgtgtaaaaaaaaaaaaaaaaaagccccctttttcctaggatgtctttactggagatgggagaagagatggagttttcatgtaactaggacttttagtggcctgctctgatatgctggaatccctgagacatgtatacaaactacacctcaggccccatgagtcttgttagatatgtcaagcctttgatattaaaaaaatacctctatactaaaaaaaatgataatactgttaaccttactaattataattaaagaaataatatctaatttactaatt

SEQ ID NO: 2601 - DNA, 280 bp, Bos taurus
  Clone ID: 08-LIB3058-028-Q1-K1-B7
aattatttgaaaagaggtcaatttatatagataatgaagttcttatatggatgactgatttatattccagataaaaaaatgacttttttcctttcaaaaccttttaacatagttttgacagctgatttctaatttaaactgcattcaatgacatataaattattttatttgggggagataaattggcccctagcttcatctatagtcccatttataaggaaacctttaaaatatttgcattttgtagttctttctgctaaattaagttgttagagcattt

SEQ ID NO: 2602 - DNA, 215 bp, Bos taurus
  Clone ID: 08-LIB3058-032-Q1-K1-B7
gtcctcgtgagcagccaggcccacagctcctcgccgggctgatcaagctggctgacacgcatgtacgaggacctgcagtcctgctacggcatctacgccagcctcttccacagcatcatcaaggtcgacttcttcaccctcacctttcggcagctggagcgtctggtggctgaagaggcctgggtgctgacagaggagctgagctccaagatgac

SEQ ID NO: 2603 - DNA, 458 bp, Bos taurus
  Clone ID: 08-LIB3058-036-Q1-K1-B7
ccggctcgacccactgcgtccgaggaaagttaggctaatgctttctgcataactttaccttcttggtaaaatggcttcgaggaagaaaggatggcattttgaggcaatggtttcttacctagtgatgccaaaattaattgaattcacgccagcccttgaatgtgtgcagtggtagggcctctctaatgaatttttcttctatgtctttttaaactacaagtagcatctgaccaatttccagggctcttggcattttatttaaagaacaaccactagaaaaaaactcttataattttgttcttgttttgcttcataaatgcctaagaacttcttttgaaaaaagaatgctcctacctcattagccagtcaaaatgctgtgatgatcagcctattctgcataacgtgtttaggaagaaagacaggaaaaaagggtacatcctggcttggctattgagggg

SEQ ID NO: 2604 - DNA, 358 bp, Bos taurus
  Clone ID: 08-LIB3058-037-Q1-K1-B7
tgctagatcgcgagcggccgttcttatattttttttttttttttttttttactttcgcacatttttattattcaacaatggatgagtatggagacacaaggatggacaacagccaagtttcaataaataagagaaacggggacagccgtgggcccgtgcctgcacagccccacataaataacgagactgctgagccagtgtggaaacggaggtggagcagtcgcctgcactgcccaggccaggggacaaacaccaacaccgcagggacacacaccaccgaggccagaggcccctttccagccccgtcgcacacgccacttcccttcgaagcgcctgagatcgtgggggtggctggggc

SEQ ID NO: 2605 - DNA, 429 bp, Bos taurus
  Clone ID: 08-LIB3058-038-Q1-K1-B7
taaggggcattttctgtgtgctaggccctcgctaattccattaccttatttaaccggtggagtaatcttgggatataaaactattagccccctcttaaagacaaagtatgtgagagaatgagaaagaggacttttgtaatgtgtcaatgtctttctactcctgaatagaactagattttgaacttaacctacctgactcacaaaacctatatctaataatacaatagagaggggtaactggattataatctccctcaaactacctcagaatcttgccacttgaggtatcttctacatttgtgtgattatagaatggaatgtcttttaggataaagtgtggacagggaacaaattgaaacgaggcccaaattttgtccccaagtagccaaagattctctctctacttaaactcagtgcacattcactttt

SEQ ID NO: 2606 - DNA, 384 bp, Bos taurus
  unsure (40): Clone ID: 08-LIB3058-040-Q1-K1-B7
cgacccacgcgtgcggggctttccctcccaactaccttcngtgccgcgggccggagggtccccaaaggacgggccgctgctcccggaggggctccccatcaacatccgagggtagcgcccgcgtctccttgcctccctgccaccccgcctctcctctcctctcttcctcttttgttgcctcgactcctggacacgacacagcctgcgctgtctcccccctcccactcgggagttggcagtgtggacgcacagcgaacacaattctcattgaagtctagaaagtcatgaagttgctgcttgaggattggtgtgtgtgatggtttccggtttccaaggaatgggaatggggcttaaccgaaaggttcattcctgccaaatgagaag

SEQ ID NO: 2607 - DNA, 438 bp, Bos taurus
  Clone ID: 08-LIB3058-045-Q1-K1-B7
ctggacgctaaccattgtctaaattcttatagtgcagcaggcatccccccaccctgccggcatgcgcgtcctgcaggctcctggccagcggctcaatggagaagacggtgcagctgtcagctcacccttgaagatcagcgaggtccctgagggtccagggtgggcgaccctccacgcccaccttctgccctgggacggccttggacgcggccctggggaccctgccgccgggcccccatgcagagtgtggagaccggcctgtggctctgagcttcctttggtttctttcccgcctcctctcacctcttaaagcacttcctttcctaaccgatcacagtggagcggcttggcggcgggagctttggtacgtggcaggcgggcgggcagctgggagtgtcccgtgtggtggccgcggctcacaccccggaggagccggat

SEQ ID NO: 2608 - DNA, 431 bp, Bos taurus
  Clone ID: 08-LIB3058-047-Q1-K1-B7
cccacgcgtccgcattaccccaccaagttctctccccagatagacgtgctgtcatatcctatcccatcttctctaagaccaagttttctatttcctctcacacatacactgatcttatatgaaatggtttacaaccacccaaaccagtcaacctggcaaagatgttaactggttggaatatcactccaataaatgttttgaatttaacaattttatagtctgtgtaaaaggaatgaaagggctatgtatcaaaggcagaagtgaaatcgtctttgacactatgtcaatgactcccctgaccaccaccccctgccccttataagccacaaatatgaccaattcatgtaacaagaactttcatttagcaacagaaaaacaggtttaacatttttttccacaatagacaactttcagctgagaagaccactctt

SEQ ID NO: 2609 - DNA, 217 bp, Bos taurus
  Clone ID: 08-LIB3058-049-Q1-K1-B11
gagtgaggaggcccatctgtgcttagtatcctggctgagcggaaccggccccatgggcagatgctgggagaggaggcccaggaggccctgcaggacctggagaacacctgccctctccctgcaacatcctccttttccttcgcttccctcctcaactaccgcaacatctggaaaaatctgcttatcctgggcttcaccaactttattggccatgcca

SEQ ID NO: 2610 - DNA, 419 bp, Bos taurus
  unsure (282),(410): unsure at all n locations; Clone ID: 08-LIB3058-049-Q1-K1-B7
tcgttcgcgcggggtctggtgggtcaggcgcttaggtcgtgtttcccggctctcgcggcgtctggcggtgccggcgcgcgcggtgcgcagagtgacatctgagagcgggttgggccggagactgtggcccaggcgtctggcgacacggtgccgcagatctgtgccgcgcgcggcccgcgccgcgcttacagacatgtgtcttggcaagtcacacaagtccttaaacagccccaggtctttgaagaaggcgcttcgcaggcgggccgggtgacacggaagcgngtgcgtttgttaagggaagactccgaaggggagccgaaagccttgcgagcatgaagcgccctttggccgggcccggaagtgggccgttgtgaagcacctggagacgcggagcccgattcttgtagcanttttgcgga

SEQ ID NO: 2611 - DNA, 405 bp, Bos taurus
  Clone ID: 08-LIB3058-056-Q1-K1-B7
ggtttttcttctgagaaagctgtaccctcccacgggggccttccctgtgtcctcaggaccccgacctccctggtcatcactgcttggcctgcggtgacccccaggaaggcagagagacccgtagtgtgaggtgcacctcttcctggaggcccatgtgtctgggcgtcccagcggggtttctgggacagccgtctgttctgggcttcggctggggttttccctgatgggtgatgcttccagccacccctggtgcaggggcgacggtccagtgggcacggcgcttgggaccaagtcgggaggcagaagaggaggccctggggagggtgcatgcggatggctgggaaggggtctaggaagggctcagctcgcgctgcccgaggggctgagtgtggttgagtacctaca

SEQ ID NO: 2612 - DNA, 89 bp, Bos taurus
  Clone ID: 09-LIB3058-002-Q1-K1-C1
atccaaactgaattggtctcgggatgcagtctgtctactctttctcgctcatccgcagatggatcacgttaactgtctcagcaagcgct

SEQ ID NO: 2613 - DNA, 213 bp, Bos taurus
  Clone ID: 09-LIB3058-002-Q1-K1-C9
atcgcaagcgccgtcggctgctcgaccaccagttgcggctcggcgatcgcgacggctttgcgctgctcggctacggcgcgccgtccgacgcgcagatgttcatcaagggctggctgttctatccgtacggcgcgccgttgccgccggtggccgccgaaatcgcgccggatcacccgcgcggtttctggctgacgcacgcgcagtggccggcgt

SEQ ID NO: 2614 - DNA, 244 bp, Bos taurus
  Clone ID: 09-LIB3058-004-Q1-K1-C1
atcatatactgtttccagtccacattggataccaggctgcgttcttattatactaaactgtcagtaatgtcattcgtgcttgatctttaagcatacattataattctaaaatgccaaaaccattgttccaaaacgtgcacactgtactcggaattagaaactagtaagttaatgctttagaacgtggttacagaacttaaagacgtctggagagcctgcatcatatgtataatgtaaccaatgt

SEQ ID NO: 2615 - DNA, 423 bp, Bos taurus
  Clone ID: 09-LIB3058-005-Q1-K1-C1
ggagaacctaaccaagtataggttctaaatgcctgcaggaattatacgaactacagctgtacttgtctcagctaacttaaaacagggttgtcacagataacttagctctgaaactttcctacttcgtgttaatatgcttgaactcgtagaactaactgtgaggcccttggagtagtggtgtccatccattcctcctcctttttacaggaacttgtcagtcatccatatcttaccaacagtgggcatctgatccaagctgggccatcagtccagctggaaatttatctttgcacaaaaattagtctctctctaggtaaatgaacctaaagcttaggagctttggtatgagtcccttgcatctgcaaacagccaatgagccaagggagctacccagtggctttctaggtcccaggtctagaacct

SEQ ID NO: 2616 - DNA, 398 bp, Bos taurus
  Clone ID: 09-LIB3058-006-Q1-K1-C9
gggaacagccccagatacgaggattgtggtgtgtcatgggagtggcaagacagtggcattggccttaagggaagccataaataaggtgctgggccaggggttgctttctccttctccaccttcatgccttgattccaaaattacagttgttttcccctgtcagacccattaaaaaaacaactgccaccctcagatcgctaagacagagccagagatcaagcaggatatgagattataagctgccttttctaactctaagcttggagactcctttccctctccttgcccttgggtcatggggtgatttcttgttttgaaattaaggtgtaacattcagacagttaaagtcacaaatcttaggtgtacagatgaatccaatttgataatagtgtacactc

SEQ ID NO: 2617 - DNA, 349 bp, Bos taurus
  Clone ID: 09-LIB3058-008-Q1-K1-C1
gtagttctagatcgcgagcggccggccttcttttttttgttctgtttttttgtttttgtttttggttttttgacggttaaaaaccataattgattattaattcttgaaacaaattaaattcagctaaattaaaacagacgacggtccagctgtgggggccgcctctgatactgagtcctaagggctctgccctgcccctccactatcgacgggggagcaaacaagctgtggtcactgaccgcaaccatggctcataacgaactcattcctaacgaagacggaagttgtagtccaccagggtgttaactaaataattacacatgcattgaaaagagggtgttaggtgaac

SEQ ID NO: 2618 - DNA, 407 bp, Bos taurus
  Clone ID: 09-LIB3058-009-Q1-K1-C1
atcatcagttattagaaatagttgtctcacagtgatactggtttttcttttgtgctgttatgatttaacattgacaggaacactacactactttaaatccttttatgttcaagtgtttgtaacttggccctataattaggctgaatcatggcttcgaggtctacaacttgtgtgtatggttcacaaccgagcttttactttgaaaatacagattgttacccactttggattaactttttcagttgtgtttttgtctttcttttttaaattgctcaaatattttttaatggtcgagttattaacacttgaaaatcagatactgcaccaaatacagtatttttttcatggtgtttttaatgagtgcccttattattaatgctgtgcatatttatgttaccggtcattgt

SEQ ID NO: 2619 - DNA, 292 bp, Bos taurus
  Clone ID: 09-LIB3058-010-Q1-K1-C1
acgaactactagagaatttagtctgattttagttattaaacatgctaatgtaaccatgatgggataaaatgctagtgaacttggaccgcttgattattttataatgtccactttgtatcattcatactgaatctcgactctgactattgttattgaagcctaaatctaagatcataacatttaaaaatacctttttaacacgctatttcgctacataactaattattgctgttatcattatcatattcctcgttctattaattttaataaataactaaaataaaaaaagtca

SEQ ID NO: 2620 - DNA, 254 bp, Bos taurus
  Clone ID: 09-LIB3058-013-Q1-K1-C9
cagggggaatgctccaatcccatctgtcttgcactgcagctcagaaatggatctgggctttctactcaaataaccagggagcagacccagtctcaggagagtcacaaccacagagcaaagaggaggtcctgctcaacatgcagtgcaggctctggtcactacaacacccatcacacctccaataaagtgcataatggtcagcatacactgagaaagaggttgcaagcatccacaccaaaaaccaaccttccacc

SEQ ID NO: 2621 - DNA, 450 bp, Bos taurus
  Clone ID: 09-LIB3058-015-Q1-K1-C1
gatgcattggcctcaaagataactcctatttgatttctgcttaccactgactttctgtgtgggtggttttttttttaaactgggaatagggcctgccctatgatttcctccccggcatcattcaagtcatttatctttgcttcctcttactttcctacaggaccagagccctgtgtacatcaaggcctacataggttgatggcagcctgattgcagtttggttcagttctgtaacaggtaagatttttgtaaatttttgtccctttaagtgttaaccccttggtaaaatgataactgattgtgttgcgggtagagaagtgttgggtttgcccagttgggagtgacttggggaccagttgcaagtagggttccaagttaccttttgagttgagttccaaatggcttgtaattcattatgaaagattgaattcttaacactgttagttggat

SEQ ID NO: 2622 - DNA, 440 bp, Bos taurus
  Clone ID: 09-LIB3058-018-Q1-K1-C9
aaatgactttctgtgtactactccaaatactggttgtgactatagtaatgttgttggtcatttttatacctaacttgtttaagaagtgctatttctcataggctgtttttggaaattttaagtatatttctttaaaatagcaatgtttttttcctatgatatgctaacatttagtaaacactggctttatggaaggcagcctgattttttataagcattgtgcatttatataaatctatcggtaattagcttggtgtagaaagataagaaaaactccatattgtatccatttggctcagggagatttctttgctttaccttttttagaactccttattgctgaacaaagttagggtacccaccattttgtaattaagtattggatgatgacttatcttgttccaggaagaagcactatcaggttatatattgagaaattc

SEQ ID NO: 2623 - DNA, 319 bp, Bos taurus
  Clone ID: 09-LIB3058-020-Q1-K1-C1
gccacggcggcgctggagcctggcgatgctgccgcagccctgaccctactgctactgcatgagccccgacaggcccagcgggcggcccacgccgatgtctttgcccccgtcaaggcccatgtggcagagctggagcggcgtttccccggtgcccgggtgccctggctcagcgtgcaaacagccgcaccctcaccactgcgcctcatggatctcctctccaagaagcacccgctggacacgctggtcctgctggccgggccagacacggtgctcacgcctgacttactgaaccgctgccgcatgcatgccatctctggct

SEQ ID NO: 2624 - DNA, 439 bp, Bos taurus
  Clone ID: 09-LIB3058-021-Q1-K1-C9
gccacaagtgcccagcccgctgccgggacccccacaaatgtcagcggccccgcaggctcacacggtcttcccgggcccaccgccagcctgactccctcgagtccccaagcactcagtgagtccacgcagggccgcaccatccaggcgccaacgccgactccccggactgtggatgacacggcacagaggcccacacccaccctcttaaacacaaccccggagcccgcctccacaactgtggcttccatgtccacgaccatggtcattacaaccaaggcccctgagccgaccgtcagcacagcggcagcctccacagctcacaccagcccggcccctacggtggaggccacgaccctgacgacacggcccagccctgccacattcacgccgggggccgcatggccaggcacgactcatacgccgtatcagaccgagcctg

SEQ ID NO: 2625 - DNA, 324 bp, Bos taurus
  Clone ID: 09-LIB3058-022-Q1-K1-C1
tcggtaaaaaaaaaaaaagccagattgtcatctagttattatttattctggactcctgtggatactaagtaataagtgtttgctaaaataacttccatattattatagtaatactgagtaacaatggaatccttatagatgggaaagggaaaagtctgctattagctatgtgggcatgaccaaataaattcagactaaaatcctcagtgcctaagaaaaagttcaataataaaaagcaatttgtaattttggcatttcaaatgtggttcaatatatccttactgatgtaaaccctatattaattaagaactctttcaattaccc

SEQ ID NO: 2626 - DNA, 213 bp, Bos taurus
  Clone ID: 09-LIB3058-023-Q1-K1-C9
tagatctccagcaggcgcaggtgcggtttcgcattaacagcgaaacaaacataggactggggtaggaccctgcggtacgagggcaagcacgtacaccttagcaaccagcacaaatccagacgaatcctggacaaaaccagggacgacacaaaccacccgaaaaatgaaatccgacagatcttggacaacccgctgaaactggaaagagcagag

SEQ ID NO: 2627 - DNA, 129 bp, Bos taurus
  Clone ID: 09-LIB3058-029-Q1-K1-C1
agtcctcgcaacacataactctgatcgctactatttctagccctatacttacctaatcgggaaaggggataaataaagcatgcccagctacaagctatatacttaactactcactttgctattaaaaat

SEQ ID NO: 2628 - DNA, 417 bp, Bos taurus
  Clone ID: 09-LIB3058-029-Q1-K1-C9
gtgatgctggctggggacttgagggggacatgtggacaggctcgagaagcagattcgagggtgagtcacggaccctcagggaatcccctaagtagcaaagccccagtcagctctggtcacaggtgaatggccttcaaatgccaaggtgagaaatgcagctttaacccagcaggcagaagagagcactggcacgtctttaactggagtcaccttttggaaaatagagacctctggtgccaaaaattgattggaaatgggagaacgtggggccttggtggcctggaaagaggaagatatggggcagaggctggtgaaagaggaacgtgggggccacacggctgatggaaaccggaagtcatggggactcggggacacgtgtgccattgacaggttctgggaatcgacagtctgggtttg

SEQ ID NO: 2629 - DNA, 439 bp, Bos taurus
  Clone ID: 09-LIB3058-035-Q1-K1-C1
cggacgcgtgggcggacgcgtgggtcattatgttgcagtagagaatcaaagcaggagagaccttgaaaccaggaggatgggtgggcggtctatgggaagtggagagcatggagtggaaagggggtccagcgggccaggaaagtgagggactgcacgtgatggtacctggcagccagggcaggagagacttgttgagaggaacacgaatgcagtgcaccaagagatggatgacaaagggctagaaggagagatgtgaagaatgtaggaactgtgctcctggaagtgggtcaaggccatgaggaagcttgtgctggtctggatggagtgcgcatttgtaggagcgcggctggcagacacaggggtaagaaggtgagaaaaaggtgagagtgtggtagtgaaaggacaagcaggagaatcagaggccgagacgccccaagtg

SEQ ID NO: 2630 - DNA, 339 bp, Bos taurus
  Clone ID: 09-LIB3058-037-Q1-K1-C1
gggcccggtgcccgcctcaggtctcatacctgtacccttctctgtagccagaacgtggctctgacttggcagcctgtgcctgttcctgtctcttttcccctccacatcagagagtggtctgctgtgttaattcgtgcagattcttctttccttggtggtcctcagaggagagagtcgcgggaggccagtgatgttaacaacatccaattccttgggccatccttttctgcgtctctcctctctttctcatccagcttccttggtctcgttcttcgcctgaacctgccagatgctcctgcattttctgtcctttggtgatggtgaagtttaagacaggcc

SEQ ID NO: 2631 - DNA, 324 bp, Bos taurus
  unsure (259): Clone ID: 09-LIB3058-040-Q1-K1-C1
gcggggctctgcctaccaactaccctgcattgccaccccacgcacatgctcaaatggaaggggttcctgcaccgcggtcaccagccaccgtctgagatggctggacacagcctggccagctcccaccgcaactccatggctcccagagccgccaccctcatcatcgtggtgtgcgtgggctatctggtgctcatggtagtcctgggtctcgtgcgcattcactcactgcaccgtcgcgtatcgggggccagtgggactnccggtgcctacagcgaccccaaggatcaccgactcttctgggatgactcagctctcaccattatc

SEQ ID NO: 2632 - DNA, 426 bp, Bos taurus
  Clone ID: 09-LIB3058-042-Q1-K1-C1
cgtgcctggcacagccggcatacagatttgttatgagtgaatgcgaggtgtgcagaagctcattatatggcacagggaagccagctggcacaggattacatacattaccacaagcaaactaatgagttgacgctaatttaatatatttttacctcacactaagatagtgcttgataaagacattaatactcaacttgtaaaatgttggcacagtgctatgcacatagtgggtgctcagtaatgttgaatggacaggtttgcaatactagatttaattccatctgacgactcttacattttcagttagagcgtagatactggaaaacccaatacacgttggatcctggttttcttgaaggtgtgacatctaaaatatttgtagaaaagctttgtcacaactgatttgaatgtttgtgtttttttttt

SEQ ID NO: 2633 - DNA, 416 bp, Bos taurus
  Clone ID: 09-LIB3058-044-Q1-K1-C1
acggcatctccgaattctagacctgtttcttatgttacctttattgatcactgatgataaatgtggagggatctgagtatataaagcaggtagagtcaatcagtattttaaacatcatactagtacttctgcgattcaaagttagagcttataaatcaaagcaacaatttggattattataaacaataatactgtaactttcacaaaaacagatggtccaaccccacaagcagatgataacttgggcagctctgtggggcgcgagacggatgagacagttgtctaactgcccaccagaccagtggctacagcgaccagcgttctgagcacctgaaagcaagcagcacaggacagggctgtggaggtccctgtgctgggcagatacctacctgacagaggtgtttcataggactgac

SEQ ID NO: 2634 - DNA, 426 bp, Bos taurus
  Clone ID: 09-LIB3058-045-Q1-K1-C1
gtggattagcagttctaggctaaattgtacaaaggctttcttttggtgcctccccaaatcaggtgagtcatttaaatagtcttagaggggtgaaaggagatactaaaacaggaaacaagtgtatagccccacccttaacttagattgcttagtgagaacatggatgactgttccttttgcaaatttgtaatttgggaaaagtcttcaaataacttttcaagagattatatttgtgctctgggctgtactattactgaggctgaaagacttccacccttgaagatggttggccacaagctaagattgaattcatgtcctgtgttctcctgccaagggtaatacagaaaggctagtcttcataggcctcctggggctcttacctagtcaaactaggagtcatgaatggccactaattgaaggaactct

SEQ ID NO: 2635 - DNA, 397 bp, Bos taurus
  Clone ID: 09-LIB3058-049-Q1-K1-C1
cgcgtccgtgattattgtgtagaagatggctatgtttcttgaaaagggattagaaagtttaatagtatagtgtacagcttgtggttaattttttaaatctcaatttaaaacattattggattttttaaaattacagtcctctgacagctggattgattggtgtttcatctcctgtcatcctttggttttctttgcccactgatttcataaaggtatagacagcaggtagtaagtccctaggaaagtttattgatgaaacactactgcaaataacagttgtctctgacatatttcatagattgattagaaaaacaggtatttaataaaagaaattatacatttgttggtaattgattgtcattaaaaaaaaccctggacctttctggaagggcagcgt

SEQ ID NO: 2636 - DNA, 323 bp, Bos taurus
  Clone ID: 09-LIB3058-051-Q1-K1-C9
gctcaggaagtggcatcttctctgcatgtactttatcccgcttccttcccgacctgggcctccctgtctgaggatcaggctccctaccttttccagggctcatcctgaagcagctaccctcggaccccaagcctagacttcctgtgagaggaggatttctgagcccctccaggtctcctggatggatggagggtgacgacagacagttgtcactgaagtgtgggcagtgcacgtacccactgcgactggtctcagtgtgggctgttgaacccctgggctgtagtgacccgacgcacagcttgcggacatcgtaccagagggag

SEQ ID NO: 2637 - DNA, 423 bp, Bos taurus
  unsure (345): Clone ID: 09-LIB3058-054-Q1-K1-C1
cgcagggtggagacctcggggttatctggctgctgctgctggcctgcacgagggtggctgggccttggtgcttgtcttatcactacccggggccctccagctcccgcaggggcccctccccagccccatcaccaccgccgccctggcgatgaacctgacggcctggagggggccagaggcagccgggagatgcggctctcggctgttggcgggtggccttggcggcttctcacaggcaacagctctgcctggagcaaggcccacgactcgggcagaattcttctgttcacttccttcattccacggaccttgtctaaggaaacctggcatcggccagattgcctncagcatgcccacccctgggcctggtgaactcccaaacaggagaactcctgggccagaatctgggtcacccagatgcct

SEQ ID NO: 2638 - DNA, 190 bp, Bos taurus
  unsure (17): Clone ID: 09-LIB3058-056-Q1-K1-C1
gcagaccccgcggctcnccagcagctttctacccgcccgtccccttgcgtctgcggggccacctgactcgtatgagccgtcttaggggcggctcctggtggttgaggcatctgagcgttcaaagacactgagtgtgccggaccgctgttctggccgcacgcgcgtctgctctggcggcctgcggctgtgc

SEQ ID NO: 2639 - DNA, 215 bp, Bos taurus
  Clone ID: 10-LIB3058-001-Q1-K1-C5
tgaaaccacagttcacatcctaaagagggtccatctctctcacaaaatgacatcattatcaaattgctcccctctcttcctctttctctttctatccaccctccacataactttcaccctctcaacccccaccaacttcatcaagttcttctgcagcaccatccatttcccatccctttacatccagtccctcttcgtctactctttcaccatcc

SEQ ID NO: 2640 - DNA, 426 bp, Bos taurus
  Clone ID: 10-LIB3058-003-Q1-K1-C9
gccgccagcgcgggcgcgggccaaggccctgcaggagcagctaaagatgtaacagaagaatcgataacagaagatgataagaggagaaactatggaggagtgtatgttggtctaccatctgaagctgtcaatatggtgtccaatcagacaaagactgtgcagaaaaattagaagaagaaaatatcatgactcaataatcaagagcctgttcatcaagatctggatgaaatttttccttcatgggattttgtaatgtgcacagacattttcaaggaaattctaaacagtcgccacccctgccgccaaattcttagttggtagttgaaaccacgggtacatactgaatgttgtggtactagaagggaattggttaaacaacatgcttggatatggaactttctgtgatccacctgcagaagacaaact

SEQ ID NO: 2641 - DNA, 240 bp, Bos taurus
  Clone ID: 10-LIB3058-005-Q1-K1-C9
acggttctagatcgcgagcgggcgccctttttttggtatttgcatgacagtgtcatggtccgttatttaagccccaaaaatcgtgctttaacaaacaaagctacttgcttaaacagcgacaagcctgaatggcgccctttcataaggggccacaattcaaggctgttgaaaaagcatcggccgccctgggatcactgagacagaaccggagatcaaacccgatatgagatcataggctgc

SEQ ID NO: 2642 - DNA, 404 bp, Bos taurus
  Clone ID: 10-LIB3058-006-Q1-K1-C5
caagaaaataaagcttcccctttagtgaatcatgtcctaggtccaggaaatccagtgttgttgaagactgtcattcacctgcttgtccccaaactgtcattctttgttcaaggtgcttttggtgtttaggggctgcctccagaaattcctgagaccttcccagtttccgttgctttccccaacagcgtggttgcatctaggccttgaggatatagatcctgctttggtaggaatgtcatttccaataaattctccttcttcatccacatacttcttctgccaaggtgcttggaagtgtttggaacccaagtttaaggtgagttgatggaacccagagcttttcctagtgaaaggagaggaaaagtacctggggcatgttacctggggcatattacctggagagg

SEQ ID NO: 2643 - DNA, 420 bp, Bos taurus
  Clone ID: 10-LIB3058-008-Q1-K1-C5
ggcggtgacaaaccatttctggcccctaatgacctgcagaccaaacatctggagcttaaggaagaatctgtgaagctatttcgaggggtaaagaagatgggtggggaggaatttagccgtcgttacttgcaacagttggagactgaaatagatgaactctacatccagtatatcaagcacaatgatagcaaaaatatcttccatgcagctcgtaccccagccacactgtttgttgtcatctttatcacatatgtgattgctggtgtgactggattcattggtttggacataatagctagcctatgcaatatgataatgggactgacccttatcaccctgtgtacctgggcatacatccggtactctggagaataccgagagctgggagctgtaatagaccaagtggctgcagccttgtgg

SEQ ID NO: 2644 - DNA, 241 bp, Bos taurus
  Clone ID: 10-LIB3058-008-Q1-K1-C9
ggccacttcttgacccctttcctttatgtatgtcctactctatccgttggggtctattcctttataccagactccttacactgtaggtcattgagctggaaaaccaaaccgagagcgacgtcaggtgagacacgccatacatctcctgttctaataccctcgttgcttcagcatccgctctacgacaagactcatcctgtagattacttccctgagatgatgacctagatacaagccaaag

SEQ ID NO: 2645 - DNA, 304 bp, Bos taurus
  Clone ID: 10-LIB3058-012-Q1-K1-C5
gtttggtatgataatgtattactttacatctaaatatcaacatcgcgtccccaaactcaggaggctctgtgtcttctcttctgtctccaccatcagttcggggacgcgatgttgatatttagatgtatggtttggtatgataatgtattactttaaaaaaattaatgctcatgaaaacaagaaaaaccagttattcaaaaattgaaaaacaatggaataataaactcttctattagagtaagccaagaagaaatttattaaacttgagatgaattggaaatttcaaaaaacaaaataaaaagaa

SEQ ID NO: 2646 - DNA, 350 bp, Bos taurus
  Clone ID: 10-LIB3058-012-Q1-K1-C9
agcgtagaaaagttagtccgaagtctggaggtcacatataccatccaatcagttcaatgctctgaatctacatggatacatgatacatatatatgcgtgttgacactactctagcagcctgaggcaacagggataagtgatgtgactcatctgctcgatatcctcaatacataatatagtccgactaggatacatagagtcatgatatagagtaagtgatggagtgcagcgccactgtaagctgagagataaagtgatacgaactctgtcataccagtttgagacgtaatgagcaatgtggacgctaacaggtgctgacaatctctcgggtagaatctcttccgggctta

SEQ ID NO: 2647 - DNA, 315 bp, Bos taurus
  Clone ID: 10-LIB3058-016-Q1-K1-C5
acagccattcagaattttttcccttgcatttacctatgtatttgaaataagagtttgtactgtttcttgatgtattaattttaggcattatttactgacctgttgatagattcagtcattgtatatctgtctgtctgcctttataaatgaagatttcactttccaatatcctagcctatgtctttccccataaccttcagaatacttatgaatcagctgttggtaatcagtagaagagttaattatgactgtggaagtattaattccttcaccaagtggataattactggcttccttcttatggaaactttattt

SEQ ID NO: 2648 - DNA, 337 bp, Bos taurus
  Clone ID: 10-LIB3058-017-Q1-K1-C9
acgcgtcccgtggagtcggcggcgcccggtcctacatctgcacgcccacccaggatggactcgaggggccggcgcgccggcgctcctactggcgctacgtgcggcgtctggtgcatggaacgccggagccgtctgtacccgcgcgtgtgccaggttggggattcggctctgcgggccgttgcggacccggtagagcccgggcagctggcgggacccgagctgcaacggatggtggagcggctagtgcaagtgatgcggcttctgcactgcgtgggcttgaacgcgccgtaactcggagtgcctctgcaggtattggcgctggagttccctgagacgc

SEQ ID NO: 2649 - DNA, 451 bp, Bos taurus
  unsure (402): Clone ID: 10-LIB3058-018-Q1-K1-C5
tcgcccagaccaacaaggttttgtgtcttgactgtttgctcatattcatcgagatccacccaggaatgggaaggcctttgctttggggggttctctgtgtgtgtggaggtctgttaataacctatggatctgcatgggaaaactgccacctcaggagtgcccagtgacaccagtagtcagccggacaccatccagagtcagccggtcacacccttggtgaacaacgaccaaaagatctttgtagatacagtcccggcccggacggacccatgtgggatctgccgtccagtaagatgacacgtgccagtcacccactgaatctgatcttaggtttctcctgcatccgcagcccaaggctttcttctttgaaagcaagggacctgggtgtggcctgagcagctntttcttgggtctgagaaatgctcctggggaaagggccccttatttgcat

SEQ ID NO: 2650 - DNA, 396 bp, Bos taurus
  Clone ID: 10-LIB3058-019-Q1-K1-C5
cggacgcgtggggccatggcgggtcctggggcttgctttccgccgcttggggcccttgtccggagctgggcccttaggctgggcctcttacgggccgcacggtaaggggcctggggatggaactggaattgtcctggggaagacctttaggatctggtgcaaaggcaaagtccaaaggaaatgtcggccttccaatcgaccagactgcccgcggaaccctgaaccttttaaaaaaccaatcagccgggtcacactgggttcccagaactgtccgtgcgtgtctccaccaatcagaagcctcctggggctccctttctcgtcggcgtccacccgggtccgacaccaccacaggagtggacactgtctgggttggcgctaggactgaaaacctgtgct

SEQ ID NO: 2651 - DNA, 424 bp, Bos taurus
  Clone ID: 10-LIB3058-020-Q1-K1-C9
agcggctcccgagccggcccgcctgcctcctcgtggccagcggcgccgcggaaggtgtgtcggcccagtccttcctccactgcttcacgctggccagcgctgccttcaacctgcaagtggccactcctggggggaagaccatggacttcgtcgacgtgaatgagagcaacgcacgctgggtgcacgacttccgtctcaaagcttacgccagccccgccaagctggagtccattgacggtgcccgctaccacgccctgctgatccccagctgtcccggggccctggtggacctggccagcagcgggtccctggctcgcatcttgcagcacttccactctgagagcaaacccatctgcgctgtgggccacggcgtggccgacctctgctgcgccactagtgaggacaggtcctgggtgttccaagg

SEQ ID NO: 2652 - DNA, 164 bp, Bos taurus
  unsure (128): Clone ID: 10-LIB3058-021-Q1-K1-C5
ggacagggcagggcttgaagaggggatggcacttggtgactaaccggggcttgtgagagcggttccaagtgctggggctttagggttcgggcctggtggtggagtgcgggtcgtaggaggttggtatntttatggtttgttttggttaatgactgagtctttgc

SEQ ID NO: 2653 - DNA, 448 bp, Bos taurus
  Clone ID: 10-LIB3058-022-Q1-K1-C9
catcagggcagctccttggcgactcagccctccctgatgggcctggccgagctgtgctcagcctcagacgcccacgaggacacggaccatggctggtccagaccctcgcgcgcctctgcggcgtgcagcgccagcacaccgctcgtgccggcaacaccgctcctgtcaggtgactccactcaacaacccggcttcaggagaccttggcgtctgcagccacacatccctgaacgcttcccaccccacggggcagggttccggcaggaagcaggcggcgctcagggtgggcagcctcaggcgaactggtgagtgtgctgggcggtggggcgcagcaggacctagagggccgcctacaggaagaggggccctggcggagtgcccgggaaggtcgcaacaccactggccacagaagagccggagctgtaaccaaatgcatcgcccaggccca

SEQ ID NO: 2654 - DNA, 420 bp, Bos taurus
  Clone ID: 10-LIB3058-023-Q1-K1-C5
ccgcaggcttcttcaggagttaggcgggcgtgacggggacattctgcagctttggggtagatcataaaacacaatcgtgccagctcctcatccgatctgggctgctgcacaccctcccccaagcactgttgggggacagtgacagccccgcccaaacttccactcccccaggacagccaggggccccgggggcaaacgctttcccacccagagtgcctcctcccaggccagtagacagggacacttggcaaggccctggcggagccccaacctccagacacggcttttagctacaaataggggtttacacgcgtgtgctgtcacttcagccgtgtctgactctttgcaaccccgtggactgtaacccggccagggccttttcccctctgtccacgggcttgcccaggcgagaatactgga

SEQ ID NO: 2655 - DNA, 341 bp, Bos taurus
  Clone ID: 10-LIB3058-024-Q1-K1-C5
ctggggcctggggctttgctcacccgtctcccgatgcctcttctctgcatggttcgcggtgcatagaagagactgagggcttcattcattgagccctgtcccctatacaaatgtccagtctttatcttcatgaagtttaaaaacagttgaagtccagcacagcgatcctagagcaggtggtgaaaaggatgagctggatgtgagtgcatgcgtcaccctgcctggacatatgtttgtgatgcttgcaggtcctgcccaaatatgtccctagtcaccctgttgctcctgttgaagtgtcctgcatgggcctagtgtttccaggatacactgcctatttccta

SEQ ID NO: 2656 - DNA, 353 bp, Bos taurus
  Clone ID: 10-LIB3058-024-Q1-K1-C9
cggacgcgtggggcactctgttgatatagggcggctaccagtattagggcctatctgaaaccttttgttgtttttattgttctccctcaaggctaggtctaaagctgtgtgaaactctgtctgcatctgtgtacagagaatacaccttccacttgagtctcttctcccactgacttgctacatccggtggtacttgtactaaattgtcttgcttgttttatttctgaaataaactgacgcatgacagcggtgagcttatgatgtgtacatataagttctataagctgggtatacagttttttacgtacaagattaaaagactatgatgatgacatttaaagataacactgaat

SEQ ID NO: 2657 - DNA, 420 bp, Bos taurus
  unsure (308),(384): unsure at all n locations; Clone ID: 10-LIB3058-025-Q1-K1-C5
ggctggctgatctccggcgaggctgtgtggagaggggtccttgagaattctgctggaccaaccggaggtcgccttcgtggctggagtgtctttgggggctcggaccccagccaagtgtgtgcctctgtccctggcagtggatggttctgaatctgaagaataagcttggaaggccagcgcacccacctcaccttgctgtgtgaccttgggcaggtggctccctctctctgagcctctgtttccccttcagctcagcagccatcatggctgacggtcagatgcccttcccctgccactacacgagccgncggcgccgggacccctcagggactcgcccctgtccttccgcctgctggacgatggctttggcatggaccccttccncgacgacttgactgcctcttggcctgactgggccct

SEQ ID NO: 2658 - DNA, 414 bp, Bos taurus
  Clone ID: 10-LIB3058-028-Q1-K1-C9
gttctagatcgcgagcggccgcccttttttttttttttttacattattcttttgtatggagtacagggtgtgcaaatgaagctgtttcagtaaatattagaaatactattttgcaaatatcaagtgaaatcagctaacaacacaacacaatacaataaaagcctgcgctaacacagagcttctcccatcaacattccccggccctttccttgtgcccttcttgattcttaattacaatttctttcattgacttggagaaattaaacaaaaggcaaaatatttcacagttgcaaaacactaagtacttcagtgataagagctggcccagtcaagtcttaaaaaaaattgaaaatgaatatagtaaaatacattgcaaattaatgttcatgaatgccactatttgattaacacaac

SEQ ID NO: 2659 - DNA, 339 bp, Bos taurus
  Clone ID: 10-LIB3058-030-Q1-K1-C5
ctctatgcttgagcttatttgttaaaaaaaaaaaaatctactaatccaacctgttagatttgcaggtgaagtcagatgcttccatgtccttcccagatttctgtgacctgctaccccatgaaatctggactggagatcacttgcttccacggagatcactcagaaccttacctgggcagaggaatctgttcccttgaaagtgtcatcagcaagcatgcagggccaccgtgttaagccatgcggattccctatctacccatgtttgcccagctccccttgaagggatcttcagtgactgctcttgcaatagatttaatgttgttttaaagtccagctttt

SEQ ID NO: 2660 - DNA, 401 bp, Bos taurus
  Clone ID: 10-LIB3058-030-Q1-K1-C9
ttcccggttcgacgcacgcgcccgggaaccataatttgccaccgggcacacccacctatgaccacacaccacacacgggcttgcactctggtcctacacctatgcctgcttttctggaggaggagcttcttgcagccacgaagtagcatatcgtgtggaccgaccctactgtcctttcaaaacagcatgctggctacagatagcatggaggcatgtgccaccaaattcagtgagaagtaaatgggagttcaaggtccacggatgtgtccgaagatggccatcctcgcttctctagctgctgagccgggcagcctctaccccgtgggcgctgaactggaatctgctgcgtgtactctggccccatcagtgatgctgctttatggacttaaaggctactcctc

SEQ ID NO: 2661 - DNA, 374 bp, Bos taurus
  Clone ID: 10-LIB3058-035-Q1-K1-C5
cgcatcccaggggctcagagtgaggaagcagccgggtggcgcacgctgcggctccatgaggcaggaggctctggaccagggcacggacgggccgccagccaggcagacgtggccaggatgggccgctggccccgctcggcagctccgcctggggaggctttgggtgaagcgccactgtcagtcgtgagcagcgcccggccagagcccaggggcccccgaggacgctttgccggccgccctgccaggcctgcccttgcgtctgctctgcgggcgccgctgggcccggccgtggccgtcggggagaaaggcccgcctgcacgtctctcccctcggctcctctctcccacgctcacggcggcctgcgtgcctggcct

SEQ ID NO: 2662 - DNA, 134 bp, Bos taurus
  Clone ID: 10-LIB3058-037-Q1-K1-C5
cgtacgcgtgggctccctcctttccgtgcctcagaggcttgatgcgcatggccagcccggggtctgggcctgtgtgaggtctgtgggtgcctcggcagtgcctgccggtggcctgccttggggggtgggcatat

SEQ ID NO: 2663 - DNA, 372 bp, Bos taurus
  Clone ID: 10-LIB3058-043-Q1-K1-C5
tccggcgcatctggggcgcaggcggcgccagttaccacagccctgggcctggacaacgaccccgacgcgcccgacgcgcagctcgcccgcgccctgctccgcacccgcctggacccggcggccctggcagcccagcttgtccccgcccctgcccccgccgcggcgctcagactccggcccccagtctacgacgatggccccacgggccccgatggcgaggacgccggcgacgagacgccagacctggaccccgagctgctgatgtatttgttggggcggatcctaacgggaatcgccgacaccgaaaccgtcgctggcccgcgtagcctccgccgcgccgacgaccaggatactggccctgaactaccccct

SEQ ID NO: 2664 - DNA, 192 bp, Bos taurus
  Clone ID: 10-LIB3058-046-Q1-K1-C9
caatttttcaaccttttgtgaaaatacttgcaacagtttaaggtgactgagttttatcttaggacaactgttgcatgccaatttgtgtgcgtgtgtgtgtgcaaacacttcaaaattgagttaaaagatgtaaatttaaaattggttgtgtatctgatctgccccaggttcagtaaataaacagttcttttt

SEQ ID NO: 2665 - DNA, 82 bp, Bos taurus
  Clone ID: 10-LIB3058-047-Q1-K1-C5
agatcgcgagcggcctacctttttttttctaaaccagaacccaagcataataaggccggttctaataatgtagagaaggtac

SEQ ID NO: 2666 - DNA, 155 bp, Bos taurus
  Clone ID: 10-LIB3058-053-Q1-K1-C5
gttaggttacatgcattttggtttacataattccaacacatattaggctgcctgccctaaatatcgggcaacaaagaagagctatgaagcttgactactggggctataagtaacgtctgtctacagatagagactggtcgttcctggttgggaag

SEQ ID NO: 2667 - DNA, 425 bp, Bos taurus
  Clone ID: 10-LIB3058-058-Q1-K1-C9
caaaggtcataaagtgtcatttaaaaattctcagcttttgtttatgtggattatttcgttgttcctttagctagttagaaattatggcagaaattttaaacatctaagcatattttcggatagctgtcagcagtgatgtccccacacatcatgtagctccgtgaagactgccttctacacataaggggagaagagcaagggggaaaagcagaacagtgtcttagtataataatgaaataattttgactttataaagacttcactgaaaaacttggggaagggaatccccttatactttgataattgcttctttacattgttacgaatacttgggtcttgtgaagttataattcacagatgatggctgtgtagaagagaggctaaaagtaagagtagagaagatagaagaacatgtttcaaaatat

SEQ ID NO: 2668 - DNA, 131 bp, Bos taurus
  unsure (50),(74): unsure at all n locations; Clone ID: 11-LIB3058-002-Q1-K1-C11
gggatgtgctcatggaggctgttcagtggtctgggaagaaccagcagcanaattccaatgcagcacttatgcangtgaaagcttggactgagcttttgaatgctttttgcacgagtggcagactcgaactg

SEQ ID NO: 2669 - DNA, 379 bp, Bos taurus
  Clone ID: 11-LIB3058-006-Q1-K1-C11
caaaatattttagcagtgaagctatttttatttccaatggaatcttaaaaaaaaaaaaacaaaacacccaatttttgaggcagataaaagcagagcatctgtgtttgaagcatgaataggtggcatgatccccatccactcttctctcctgcccttctacttctcattcttggcctagagggtaccatcagggaggtttcaggttccagagaacccagtttgtaaaccactgccctggcacaggctgcccagtggtgggagaggcaatgctaagagctccaagcctccttgctggcccagtgtgagcaagttctgtctatgaactgaaataacatacaggtctcttctgaaaattcttacctatagctgcaagaaagga

SEQ ID NO: 2670 - DNA, 301 bp, Bos taurus
  Clone ID: 11-LIB3058-006-Q1-K1-C3
catgaaaataaagcttcccctttagtgaatcatgtcctatgttcaggaaatccagtggtgttgaagactgtcattcacctgcttgtccccaaactgtcattctttgttcaaggtgcttttggtgtttaggggctgcctccagaaattcctgagaccttcccagtttccgttgctttccccaacagcgtggttgcatctaggcctgagggatatagatcctgctttgtgaggaatgtcatttccaataaattctccttcttcatccacataacttctctgccaaggtgcttggaagtgtttg

SEQ ID NO: 2671 - DNA, 383 bp, Bos taurus
  Clone ID: 11-LIB3058-007-Q1-K1-C11
ggctctccaggtgaagaaggacctgatgcatcggcagatccggaagcagattaagttaatagaaactgagttattgcagttgacacagctggagttaaagaggaaatccctggacacagaggcactgcaggagatgatctcggagcagcgctgggccctaagctcgctgctccagcagctgctcaaggagaagacgcagcgagaagaggagctccgggagatcctgacggagttagaagcccaaagcgaaaccaagcaggagaattactggctgattcagtatcagcggctcttgaaccagaaacccttgtccttgaagctgcaggaagaaggcttggagcgcccgctggtggccctcctggtggagctgtcggccgagcact

SEQ ID NO: 2672 - DNA, 152 bp, Bos taurus
  Clone ID: 11-LIB3058-007-Q1-K1-C3
acgcagtacacgtagctatcgcgagcggccgtccttttcaccatgaccggcaagatagtctgctggtgttctttgtcaatcgctttttccttttaatacggctctttattcaaatatgtcgcttttaaaatctttatcttttttcttcaacc

SEQ ID NO: 2673 - DNA, 378 bp, Bos taurus
  Clone ID: 11-LIB3058-009-Q1-K1-C11
gcggagcaggcggcgtccacggcccgcgggaggctccgtgctgtcctgggagccaggctgaggccgggggccgtcccgggggggcgtgggtgggagggggcaggggaagggggctgagttgcaccaaggctgtagctgggctacgtgatcttgctggaagtgtttctaaagatagcaccacttttttgttgctgtttttttaaaagaagcttttatatattaaagaaacttatcacgcgccaactgtgaatagctgccgctagtgcggaggccccgggagggtcccctggggctcccagcgcaacactggaaatgactgttccaggggcggtggacccggcagagacggccccccgagatcatcgccctttctcttct

SEQ ID NO: 2674 - DNA, 387 bp, Bos taurus
  Clone ID: 11-LIB3058-009-Q1-K1-C3
tagatcgcgagcggccgcccttttttttatattgatactgtttttttttgttttactggttaactttattaaaaaagaaacacaattaagagaataaaatgttttgaccctttctggcactttgctctggcagctgctttttgtcactccagccagcggggccagacctgggcccccagcacggagtggatgcccaggtggacctcaggctcagtcagccgtcccacgaggggtgcgggtgccccctcaaaaatctgtttagcacgtgcatgctaagcaggccctggagatgctgttgggcccagcctgatgccagtcatggggcattgagttcagaacacatcttatggtaggggccatagatatcactagaagctgcatgtgtcc

SEQ ID NO: 2675 - DNA, 396 bp, Bos taurus
  unsure (1): Clone ID: 11-LIB3058-012-Q1-K1-C3
nggacgcgtgggcggacgcgtgggttccgggagaagccggaagagaccataccctgtgtagaaacggagctagtcagcccctcccccgacccctactgaaagtgtggacccagtcagcaaccatgccatggagctctctgatgtcacccttattgagggtgtgagttatgaggtgactgtggtcgctggtgtggtggtgctcattctaaccttggtactaacttggctctgtacctacgtaacatacagcggtagcaacctgctcctgtccactatagcgtcagctggcgacacattcgtacttgacctggcgcatgtggaccatctggtagcggtccaaggcacctgagagccaactgaactccggcatccatgacagggtaatgatgagaaggc

SEQ ID NO: 2676 - DNA, 426 bp, Bos taurus
  Clone ID: 11-LIB3058-016-Q1-K1-C3
gttctagatcgcgagcggccgcccttttttttttttttttttgtgttacaacacttttaatacattcaagagtatttaatacaacaaaatttagggtatcatcagtcagcagaatcctgttgtcaagagaaagcccacgggtccttttgcaggaagcttgtgcttggtgggaggaggcaggcggcccctggcaccctggctgcaggcaggctgggcctggcggcacatccgggaccaggccatccagaccgccccttagagcccgcagtcccaacggggccttctgcagtctcctcatgggacccccgtgcggaccgagggcctggctacatgggctgtcgtcagaggcagcagggcccccgggagaccccttgtagccccaccagccctgggccgaaaccgggcccttccctaggggacacgggg

SEQ ID NO: 2677 - DNA, 166 bp, Bos taurus
  unsure (68): Clone ID: 11-LIB3058-019-Q1-K1-C3
attcactgttacaatctgtacaattgctgaatggttgtagtgatacttcttatcacctacatttactntattctgatatctcagaataaatttattgtcttagacccctatccacaagcaagttgggtagagcatacctgaaattccgaggcatgaggacaaagta

SEQ ID NO: 2678 - DNA, 295 bp, Bos taurus
  Clone ID: 11-LIB3058-021-Q1-K1-C11
aattcttatgaaactcaaagcaagatcttatgattggaaaaggatctattcctctttactgaactgccttccagctgttggggggcagttaagtaaagagagaggaagtatgtatgtattgcgagcaagttccacttatgaatcacccatcaaccacagttgtagagagctgaaacccttcccctaaagcaatttctaaatcagtctaacacttacccttgtcttgacttttcattaattattcgaatggaatctaacggagggctgttatacttgaaatcagtttatttattgt

SEQ ID NO: 2679 - DNA, 63 bp, Bos taurus
  Clone ID: 11-LIB3058-022-Q1-K1-C3
ccacgcgtctcgcggacgcgtgggttctttggacaccccgaagaatcagaataagtgctgctt

SEQ ID NO: 2680 - DNA, 380 bp, Bos taurus
  Clone ID: 11-LIB3058-024-Q1-K1-C3
cacggctcctgggggccagggggcggtgtcggtgttctctgcagcatccagagcaaaaccacaatgcgctgggaaggggccggaggctgggtctcccacccgtttgctgcaggccaagggggggagggctgctgggggagattggccctgactgttgtcagaggcgatgccatcccagggtggtcccgggtggcaggactgaggtggagggagtgcaccctttcacccgcacagcacgttgcgccaactcttaacatgtaaaatcacgtgtgccaagggcaagcggagggcttactgtgacccgtaagcccgcttagagcagccatgctggctagttcacggggctagggctcctggggtcatgataggctgctctttct

SEQ ID NO: 2681 - DNA, 281 bp, Bos taurus
  Clone ID: 11-LIB3058-028-Q1-K1-C3
ttcgagttgcctggcttccagcaccatatgccatccatccttcctgaagggtgttgggaattgaaacgaaagagtggggattgccagatttatgcgactcatatttcattcggtgaatgagtttttgaatgtgattatggagtggttctgtgtatgcagtactgcatattataagccatttattttttttacttccttctgaaagcaataatttaagggaattatgtactagaagggtttttcagcaattaaaaaaaatttaatataatgccagatatttt

SEQ ID NO: 2682 - DNA, 422 bp, Bos taurus
  Clone ID: 11-LIB3058-029-Q1-K1-C11
ggaaccagaatttgcccccgttgcacacccaccccttctgacacacacaccacacacgcccttgtcactctggtcccacacctctgcctgcttttctgggggaggagcttcttgcagccggaagtagcatattgtgtggaccgaccctcctgtcctttcaaaacagcatgctggctacagatagcagggaggcatgtgccaccaaattcagtgagaagtaaatgggagttcaaggtccacggaggtgtccgaggatggccctcctcgcttctctagctggtgagccgggcagccccgaccccgggggcgctgaactggaatctgctgcgtgttctctcgccccatctgtgatgctgctttatgttcttagaggctacacctcaaattagctgtggattttgtctcctgcactgccagtatgc

SEQ ID NO: 2683 - DNA, 439 bp, Bos taurus
  Clone ID: 11-LIB3058-029-Q1-K1-C3
cggacgcgtgggaaataccagaggacctgggtcatgtgaggttacgtcagctgaacttgtgctgtgttctgaaggagaaacaaaaactaggctggcactttggcagttgtaaggtctgcgtgggtgctcttacttaagaaactgtatatggtccacttaattacacagtgcagagttcagctatctgaaggaattataaatggagctgagttccgcagctgaattaggcagtgacatgttctccacactagccagggtgtcagtttgataggaaaatggagtactgtgtgataatttatgagatgattagtctcaggaacctctttggattgaaagacctctgttctaggtcatcttcttttgacttcttttagtattataagttgaattacatttgtaatcactcttggctttgtctttggggctgaacatgctggct

SEQ ID NO: 2684 - DNA, 408 bp, Bos taurus
  unsure (22): Clone ID: 11-LIB3058-035-Q1-K1-C11
gcgttcgcgggcgcgtgggggntagtcttaatatttaggttctgcttgaatgattagttattatgagtggatcttttgaacctttggagctaaaagtgcagagttgagtctagagaaatgctgatttcaaactctgataatcccagtttctagcccatagttcatagcatcaatgaactgaggccataatagtggattttatcagctctgcccatcagcttgtgctggaagcaaatttcttgagtcattagtcagtatatagcactgaactctctttaagagcaaatttctgatcagctgtgcttctgcaatttaaaatatttaaagggagataggtgtggaatgggaggaggaggctaaattgggccagggcgaaggaaatcggctctgtttaacttgtctgggaca

SEQ ID NO: 2685 - DNA, 417 bp, Bos taurus
  unsure (349): Clone ID: 11-LIB3058-035-Q1-K1-C3
gtagaatttgaagatattatatgatgattcaatttagttttctctttccaggattctggaggagaatgctctctattatctgttacaggtcctcagaatggttggaatgatccgccagctttgaacagaggacccaagaagaagaagatgcctgagaactttacgcctcctgttcccatcacatcaccaatcatgaaccccttgggtgacccccagtctcagatgctgcagcagcagccttcagcgccagtaccgctgtccagccaagctccattcccacagccacacctcgccggtggccagcccttccgtggcatccagcagcccctcagtcaaccaggcatgcctncatcgttttcaaagcccaatatcgaaggtgcccctggggctcccattggaaataccatgcaacatgtg

SEQ ID NO: 2686 - DNA, 312 bp, Bos taurus
  unsure (62): Clone ID: 11-LIB3058-038-Q1-K1-C3
attcccggtccgacccactcgttcgtatgggtttggcatggctttgggcagccctatttttntaatgctcaattctgtgttcctgctgtggtggagaattagcatggtatgtcttgctctggaacttgttggctcttgggtggagcttggtttcagtgtaagtttggagttttttgagtgagctcttgactattaatgttccctggaatcaggagttctctgatgttcccagaccttcatctggctttcagacttattcttaaaatagcctcaagacttctccatccgtacagcacagatgttaaaacatct

SEQ ID NO: 2687 - DNA, 298 bp, Bos taurus
  Clone ID: 11-LIB3058-040-Q1-K1-C11
cgggacagccctttccctgaggaaagcctgaggcccttgcctgcgggtgacatcactggcggcgccgggcaggcaggcgaaggagacccagtgagagaaacggagctgtcctgtggtagagctggagcccgattcccctgctctgtgcacacttgctgctgcagtcagcatgtatggcggccatggacgccaagtggtgctgagagcagtggggcatggctgcagccctgcaggtcctgcgtcacttggccagagcccccttgggcccactcctctgggggggcccattggcccgcat

SEQ ID NO: 2688 - DNA, 274 bp, Bos taurus
  Clone ID: 11-LIB3058-040-Q1-K1-C3
gcgggataaacagtcatatcttttactactactcctgaaaaaaattcaagggccagagcatttaaaatgaaaatttgcgagagtaatttgtcttcctattttcccttcatttcccttcatccctcagacttatgtcacgtaaagcacgataaatactgattcataatgaacttgactgctggcatgaggctcatatgattcctgattctctttgtgctttagcttcagagaatcgcaactgctcaagttctgagtttgcctgtgaggttggtgt

SEQ ID NO: 2689 - DNA, 445 bp, Bos taurus
  Clone ID: 11-LIB3058-045-Q1-K1-C11
ctagatcgcgagcggccgcccttttttttttttttttttttagtttgctgatttaatggcactttgctgcttttgcttttctggtggtgagggtgccaccttggggcggggggtggggggtggggcggtgctgtgggagtgagacggggtggttgtggtgtgctgagtgatggagatggggggcctgggtggcacacggacatatggagggcccggcactaggaggtggctagttgacatgatacatgcgaatctggtaaatactatattatataatatgtcgctgtacactatgcttgctgtatgtgacatttcatgctgttaggtccttgacccatgcttacgttattctagtcctaatgttacaagattctgcctatgtgctgcttgacattctgaaatgtattgtgtggcataattagcttatacatatgcattttacatg

SEQ ID NO: 2690 - DNA, 69 bp, Bos taurus
  Clone ID: 11-LIB3058-046-Q1-K1-C3
tcgggactggtccctcagctagatttagctgtttggtgtctgagggcctgaagccgaggaattcggcta

SEQ ID NO: 2691 - DNA, 191 bp, Bos taurus
  Clone ID: 11-LIB3058-048-Q1-K1-C3
gatgatcagtgcccacaagtggggctctttaagcccactccagggtccccatctccgtccaagtcagagggacttaactgcatacccttcccccattccctcctgccacccactgctgctaacctttggggcattgctgcgggctttagtcactgacataaatgcaacaaataaagacaactgctgtggcc

SEQ ID NO: 2692 - DNA, 446 bp, Bos taurus
  Clone ID: 11-LIB3058-051-Q1-K1-C11
aaaatgtcttctaaaacttcatgatacatgtttttttgtgacttaatattttgaagacatctcattttaaaaaatacattaatctgatcatctgttaagtaacttttcttgatataatggcaggtctattacaggtatccctcaacatatggctatatacttacataagtttaaacagaacagagataggcaagtccatctaaaattcagggataaagaattttgtagtagttccatgtcagtttcactctgtgtcatcttttttccccccagtagtggctgttaccctgttgataaagttcagtatcatttttcaaaaacttagatgattgatctgatactgtaaagataaataattttgacttttcagtgactcagaaatccattgcacataataacataattttgcttaatattgaggtacttgtgcttaaaaaggttttttt

SEQ ID NO: 2693 - DNA, 399 bp, Bos taurus
  Clone ID: 11-LIB3058-052-Q1-K1-C11
cgttggtctaaagtcagtagagcatgggtttcgggttctggagccccactctcatcagcctgtttgcacttacagggtctacctggcagagcatgtccaacagcgaagtgatagcctagactgaagagtttgggttcactgtttgcatcctgccttgattgcccgtcaggttacagtggaggccatcactgtgctgaagtgggtggactgcactgtgtccgagccgacgtacttgcagctgcacactgaccacacgccactgcacctagctctgctggatgagatcagcacttgacgtcagctcctgtgcccctaggacctgcagctgctggtgcagctcttctagacagagcactcttaggtggacgtgatggagcaccttgagttgaaaaagaccct

SEQ ID NO: 2694 - DNA, 426 bp, Bos taurus
  Clone ID: 11-LIB3058-052-Q1-K1-C3
aagatcccaatatagaaatggtaagagttctgaatgtacttactgagcatatgaaaagcagataaacttcatttctagctgaagaatattgaaataaaatgacaaacctttcttacttttttttttggctacaccacttggcatgtgagatcttagttccccttcccatctctccaccggggatccaactcatgctgtctgcattggaagggcagagtcttaaccactggactgccaggaaagtcctacttttcaaaatgataaagattttttttaattatgataatgctgatgatggtatgataaaatagtctcatacactgctgacagaagtataaagtgattgaagtttcctgggaagcaatttgtgtatatgaagaatcttcagaatacttaacaattacactcctcaactgaggaattata

SEQ ID NO: 2695 - DNA, 341 bp, Bos taurus
  Clone ID: 11-LIB3058-057-Q1-K1-C3
agaagttttagatttatttatataagagtgtgtgccaaacacttggagctattaagatgaataatttcctgcttttttctttctgcatcttttttttaacctgtttgttctgaatattagcctcccaattaagaccattttttcagtttgttctagtttattcttgggttggcaggaaacttgccatattatagtctctttcacatcattctttgcctttgctcatatcagcctccctctttatcctaatcatgtgtcatgtgtgttggtcgctcagtcgtgtccgactctttgtgaccccacggactgtagcccaccgggttcctctgtccatgggattc

SEQ ID NO: 2696 - DNA, 427 bp, Bos taurus
  Clone ID: 11-LIB3058-058-Q1-K1-C3
cggacgcgtggggtttgaattaagagtttgtatatggtttcctttggttatatgttaaatcaaaaggtctgtgtaatgtatcaattttgactacatttaaaaaaaaaaaataatgtaatggtaatagtagaaatgtgccacacttaagttttgtacaatatgaaattcagttaaaagaacttgtggttcatacttaacagaatattacttgcatgaagtacttaatgtttggttatcctgaagtttctgagtgcatagggtattctttgtgtaaaactatgtttttgtcagtcgttcagaatatggttatttattctgataattgaccctcttgcacatggcagtgtattttctgggatatatcattaggggagagggcttctgccaatatttgcaggttgagtttgtgctgtttaagaaggactga

SEQ ID NO: 2697 - DNA, 416 bp, Bos taurus
  Clone ID: 12-LIB3058-001-Q1-K1-C11
tttaaaaggaaggttatctgggcttacgatgataggctccttgatcctattctttgctttggtgtgaatctacaattccaagtgtcttcatgattgtacttgaagcagtattaactgaatgagttaattttattcagatttaagatagagcactggactctgcttgctcagtcttgttgggttttttgtttatttgatttttttcttttgttttggacacattcccttatggtctgtgggaattatgagattgtctctgtaatatttttcacttttttgtactgcgtcagagactctccatttcttctgtggatctttaaatgactctgttcataatctagaggtttgaatctgcagtccaatgtaaattaaattgcgttgctttcccccagtccttccacctgccattacctact

SEQ ID NO: 2698 - DNA, 287 bp, Bos taurus
  Clone ID: 12-LIB3058-001-Q1-K1-C7
gaggcggtcaggacccacgagccggtgtcaaccttcccccggggcggtgggccatgctggcatctacaacctccatccatcccccccggggtgggggcgttcccacccagccccgcccacctggcccgtgcctcccggggagtttcatccggctcgcccccgcgcgcagtgataactctccgggtggcgaccctgccgtccagcggggcctgccacgggaaggctctccgcttactcccagcttgactcgttcggaggacaagcagcttcagatcgcaccatcaccg

SEQ ID NO: 2699 - DNA, 245 bp, Bos taurus
  Clone ID: 12-LIB3058-002-Q1-K1-C7
gtgactcgagctcgaccaacggtaccctgtcggtcgacaccatcatcatcaagatcatcgacctggggatccacgcggactacgcccacgcggtatccctctatgcctgcctcgatgacttgaagtggactctcaacctcgacgtctccgtacacggctccggcttggtcctcatcaaacggaactgcctggctgctgatacccacgcgggcctgaccgtgaaactctgcgaccacgcttgatcg

SEQ ID NO: 2700 - DNA, 436 bp, Bos taurus
  Clone ID: 12-LIB3058-004-Q1-K1-C7
aaagagcatacagaattgaatactatagaaatctgtttcttaaatggcaaaagtggaaagctagccaggtgatgttggctgtagtagaattgttctgcccattaaaaatcatagtggagtttgtttttaagccaaaaattatggtttcagttctaaaccactaggttaatacttaaagaagaatcacactgtactgttggggtgaagctttttcagttcaatgctgtcttaccttgttctgttccagttgtgttggacttgtgcacagtactggaagtaagatttgagggaaacgacccatgtacatatcactcacagggctggaattatttagaaaagcataagcaagagcagcagatcactgcattatataacagaaaccttcatttgaaagtaaaggctatttaactttctgtcacaggaagaggagaaatca

SEQ ID NO: 2701 - DNA, 458 bp, Bos taurus
  Clone ID: 12-LIB3058-005-Q1-K1-C11
atgagtttgtcccaattgtattggacttaagatgttggcagaatatctaagttgtaatgtcaggcagagttaaaaatgagtgtttagagttcaggagagacatcagtaccagagttggaaacctgagacgcaaccacatggaggagataatgaaatctatagcaatggatgaaattcccaagaagcaaagaagtggaaaaaaaaaaaaaactacttgtgtggaattttgggaaatcactagcactctacaacatagttctcttaattgcatgaaaggtctattgctaaagattagcagaggctaatcatctcttaatgatggagaagcagcatgtcggatgtatcagaaatgcagcagatccatacagaagggagcgcaattccagaattcccttttataacacttcagtgtatctgttgccgacaaagaaccgagcaaacatcattttgagatgccc

SEQ ID NO: 2702 - DNA, 156 bp, Bos taurus
  Clone ID: 12-LIB3058-005-Q1-K1-C7
gcgagcggtcgaccttgatttcctttttttttgtgtagtgttttatttataacggggggcccatttattggggagaacttatgttgccgattgctattcccgtgcagatcgaaacaccactccacgttcttggagcccaaccgcatacctgttcaa

SEQ ID NO: 2703 - DNA, 125 bp, Bos taurus
  Clone ID: 12-LIB3058-008-Q1-K1-C7
gggacttaactgcatacccttcccccattccctcctgccacccactgctgctaacctttggggcattgctgcgggctttagtcactgacataaatgcaacaaataaagacaactgctgtggcctt

SEQ ID NO: 2704 - DNA, 245 bp, Bos taurus
  Clone ID: 12-LIB3058-014-Q1-K1-C7
ctccgctcgtacagatcgcgagctgtctcgcttttgttccaggggcctggttcacttttactgactgcactcctctgtgcccaggttcctgaacatcttgtgcaaatcatgacggaattctgctggccaacttgatcacctgtactttatccactattcatttttctatactactcagtgcctcataatccatggggtcccaaagagtcggactggactgactgactttcagctctcctttcact

SEQ ID NO: 2705 - DNA, 327 bp, Bos taurus
  Clone ID: 12-LIB3058-015-Q1-K1-C7
ggaaatatcattcccaaggttaagggtattcccaaaggcatattccaatatctggcaattttttgaaggtattgggttcaagggccaacaacattcccaaacccaacaaagcttcggaaggtgggtgaatcttgaatgtaaaaccatggcttgtgaaggcctaacgtgttaaaaaacgtgcttcctgtgctttcccttacacaggtatggtacacttttgtgcccagacacagggcctcatagggagagcacagtgagcttatccgcagagaatctctgtgacaatatgtctgtctctgtggagttaaagtcacagtctctcacaca

SEQ ID NO: 2706 - DNA, 247 bp, Bos taurus
  Clone ID: 12-LIB3058-016-Q1-K1-C11
cacgagcggccgccctttgagcactgttttcttcctttatttttccttaaaggggtaggctttattaaccaatttgcaaaacactagagcctaactgccaactgaactcatgcattctattgacaaagtgctcgcaatagccgaagaagacacccgacgatcatagtgaatcacagagatgccctttatgaaccacctgcctagccttcagacgacacaataccatgcaagcgttcaatgatttata

SEQ ID NO: 2707 - DNA, 231 bp, Bos taurus
  Clone ID: 12-LIB3058-016-Q1-K1-C7
ttcggtcgaccacgcgtcgaagattctttctaccgtcacagggagcggttccggcgggctttgtcgtgggagcggcgggcagctggagtgtccggtggggccgggctcaaccccggaggagccggatcggcgcgtgcggagaaggacgcgggcggactcggcgggctcgggggtccgcgacggcgctaggcgcggtgacgtactgccccgggacgactactttttcggagc

SEQ ID NO: 2708 - DNA, 182 bp, Bos taurus
  Clone ID: 12-LIB3058-017-Q1-K1-C7
cgagcggccgcccttgcgacttattcaactacctgaaccaacaacataaccatattatgcatatatcagcgagcaacctaggggatggtagccatctgtggtccaaaacgtgtctttagagatatatgaactcgaaattcacgttactgatatcgactagtcgacatgtgtctagaaccaat

SEQ ID NO: 2709 - DNA, 155 bp, Bos taurus
  Clone ID: 12-LIB3058-018-Q1-K1-C7
caatagcttgggagtggattgcaagcatggtgtacctgagcttaagacttatgagtagggctaagggagatggaaaccgtgactgaaaggaaggagcattgagtggttttgcgcatagtacacggtaagggacgtacacacgatggaaggggcat

SEQ ID NO: 2710 - DNA, 159 bp, Bos taurus
  Clone ID: 12-LIB3058-019-Q1-K1-C7
gtactagatgctgacagttgactgatttcttttgccttggatgccacatagccttatggcaagggtcttcctcaaatcatagattcatttataccttcatgcaaaataatccccgttatgctcccttatctgatgcgacattctttgtgcctaactacc

SEQ ID NO: 2711 - DNA, 289 bp, Bos taurus
  Clone ID: 12-LIB3058-022-Q1-K1-C11
caagcgatggctctgaggaaggtgttgccagccccgtcagcgcagcccccagcggtgggcatgggtggggtcacccatcattggtgcccgccgacgtgctgcagaaagctggtggcccggggtggaccatgtgggtgggcgtggtgtggggggagcccctgaacccgtggccccttgatgccctccagcgtccattctggctcactcagccattcaccatgacagctgttggggtcgaagagcttatgacctgtactctgttgatgaggagctagtatgggcattatcc

SEQ ID NO: 2712 - DNA, 130 bp, Bos taurus
  Clone ID: 12-LIB3058-022-Q1-K1-C7
taaatcgctagcggtcgtgcttttttcatacttctatgcttagaaatacctttaattgataaaggcatagcatatgaccgccaggattattcagtgccaaaaccaaactcattaaatagatgatgccaat

SEQ ID NO: 2713 - DNA, 382 bp, Bos taurus
  Clone ID: 12-LIB3058-027-Q1-K1-C7
cggacgcgtgggctgtctgccaacaaccgacagtggcaggggactcaggggaggctgggcacttggctcttgcaggtcagtgctccaccactcacacctgcctctcaacctcaggagcccccagagctccctgttatttacatgggtgcacagtgatgcaggaggctgcagaggggagcaggtacgagggggtgcagcgggaacaccagggaagtcctttttctgtttttaaaccacatagccttgaactgtgaacatctgcactttaactcagcttattctggccctgtgtaagcaagatctttgacaaggaaaacatgaatttcatacacaccgatgtcttttatgaagcttaccataggagggctgcaattagcacagc

SEQ ID NO: 2714 - DNA, 271 bp, Bos taurus
  Clone ID: 12-LIB3058-028-Q1-K1-C7
agcacgcgtcctgccgtctttgagtttaccaagcacagcaaatgtaactagggttaggcgccttccattgatcggatagcaaccataccctgtcactaattgtgaaaacaaaaccaggactatatcgtgaacacatctgtggagcacaatgaagaactcaaataccacaacaattgtgccctcaagtacagaaacacatactatatgactactcataccgtggtaggccacatgctagagaccagccatgatcacatctaactggcagggg

SEQ ID NO: 2715 - DNA, 223 bp, Bos taurus
  Clone ID: 12-LIB3058-031-Q1-K1-C7
ggaattcccgcccgacgcacgcgtccgggcttgacaacaacgtactaatgtacactctaaaactattcaatgctatctacggacagccacctgtggctgatggcttcatcatggagatgtttcataaagccacccaatgaaaaaggcgccactatccgactcaacttacgccagcgattaaggttctctaggctgagccaggactacattaacttgcagccat

SEQ ID NO: 2716 - DNA, 88 bp, Bos taurus
  Clone ID: 12-LIB3058-032-Q1-K1-C11
ggccgccctttttttttttttttttttttaaaagtgtattactttaatttattagagggtaatttttaatatttatttgtgttatatt

SEQ ID NO: 2717 - DNA, 365 bp, Bos taurus
  Clone ID: 12-LIB3058-037-Q1-K1-C7
cgtgatggcagcgacggcggttttacttgcggagctggaggaggagtttcggtggctgttacacgacgaggtgcatgccgcgctgaggcaactgcaagacattctcaaggaagccttgcttcgcttcactttgccaagctcaagcaccgaagggcccaccaaacaggagaaccttatttttggggcagttgtggcacagaccaggtgaaggccgcgctgactctgcagggagatgcgctgagccaggcggacgtgaacctgaagatgcccaggaacaaccagctgctgcactttgccttccgggaggacaagcaatggaaactgcagcagatccaagatgccaggaaccacgtgagccaagccat

SEQ ID NO: 2718 - DNA, 423 bp, Bos taurus
  Clone ID: 12-LIB3058-038-Q1-K1-C11
cggactcgtgggatcgcgagcggtttccctttttttttttttttttttttttttggtttggaaaactatttcagaactttgttcatttttccaagggcctctcttgactgactttttaaatcaaattattctctctgaggtgccctcatatttttatcctttttataattctgctggatcctcagatgtcagtggttatacctgcagtgtgattatatcctgaaaatcaaatttcataggcttcatgaaatcctgcatcttttgcgaataactgatgggcaagagactacgtattacattatattgtcttaactaccatgctaatcatatcaggagccaagaggaacaaaaataatgacagtatgggtaaccaatgttaagtgaagaaaggcgaactaattctattagtggtcagttcattag

SEQ ID NO: 2719 - DNA, 429 bp, Bos taurus
  Clone ID: 12-LIB3058-039-Q1-K1-C11
cggacgcgtgggtcgcgagtggccgcttttttttttttttttttattccaataatttagtagaaaattaaaataataaataatatgaaacaaattgggaagatgctgagccggtgcaggcccaggtcagcctagtattaaggaagtagggagggtggcggggaggaggagggagcaaacaaccctgcgcaatggtgaggaggcggctcaaaacgcggtgggtgttatcacggtggcttgacactttggcgtgtagatgtactaaaaaaagagaaagggaattctaaatccttctaaacccgctggtgaggggagagggcaggacaacgatggggatgaaggaacgaacgtaggccttctgaaggcctctgaggggaggggctggaatgtaccgtgtggttagcaatgaggtgggaatggatggaaaagg

SEQ ID NO: 2720 - DNA, 438 bp, Bos taurus
  Clone ID: 12-LIB3058-039-Q1-K1-C7
gccggcaccgccgcccagcgattcggtttcggcggctcagagcgcggctgaggcgggcgcgggcggcggcggcagcctctcgtccgtcagtccgtcctgggagcttcgcctgcgcaccgacccgcggggagacagcgcgcgctcccgtccgcagcggcggcggggacgtcaggctcgcggcccctccagcccccaagatgaggaaactgaggctcagaggacagtgatatacccacctgcacggaacttggtcattgcggtgcactaaccaggtggtcggcccccgagggcccatgccgtgaggtgaggacacccagccagcatgccgtgggacgcgcgactgccggggggcggcgcgtaaggtgggcccgagggcacaggggcggcgcgctctagggcacagaagcagtgccgcaagtcgtcgttcgccttctacca

SEQ ID NO: 2721 - DNA, 425 bp, Bos taurus
  Clone ID: 12-LIB3058-041-Q1-K1-C11
cgagagtgcttattgcttttggttgctttccagtgaagtgtgaagcactgcagtgagagctaggaaatccggagcagttagagagactgagaagggaaggggctgctgctgcctgtcatctcgtgggccaagttgatttttggagatttaatttttggtcatatatcaacaatgtgcttattttatgaaaaaacatttctattggggtaagaactgttcttggctgtactgtgtagagatgaatgctttgtacaataggtggtaagaaaaagaaataagaaattaggtccttgagagatctgtgggaattgagaattttgttattcagcaagcatgggctgggaggtaactagggacccagagtgtgtttagtctgagagttaagtgatcaaagcagtgtgctgacctttatgaggcatgttgga

SEQ ID NO: 2722 - DNA, 406 bp, Bos taurus
  Clone ID: 12-LIB3058-046-Q1-K1-C7
ggactttctgtcagactttgagatgatgttacaacggaaaaagagcatgagtggcaagcgcagacgcaaccgcgatggtggcacttttattagtgatgctgacgatgttgtgagtgccatgattgtcaagatgaatgaagctgctgaggaagacagacagttgaataatcaaaaaaaaccagcactgaaaaaattaacattattacctactgtggacatgcaccttaagaagcaggacctttaagaaacatttattgacagtggtgtgatgtccgccatcaaagaatggctctctcctctaccagataggagtttaccagcactgaagaatcgagatgagctgctgaggattctgcaagagctacctagtgtgagccaggaaaccctggagcatagtgggattgga

SEQ ID NO: 2723 - DNA, 440 bp, Bos taurus
  Clone ID: 12-LIB3058-048-Q1-K1-C11
gaattttgaacatagtattccactgaatcttggttttaggattcctttcccttgtactctttgaaatctacatagttctgactcagcaatatttagaagtttgcatgtgaccattttctttctttctcccttagaatacccaagtagtgtttgtgtgttgtatgtcttttatgggtcaaatacataattaccagaaaattttgaaaatacagcactttctagagttattgttaaaatgtcaatgtatagtttagcttttctgcatgtgtgtatacatatgcagaaaatatgtacatattttaacatacatatgtgcaaagggggtcatattatataaactacattgtaacttaactgtgggcatctttccatgctaataaataaacactcaattatctgaataaacagatcagtgggggcaagttggggtagcaaccacc

SEQ ID NO: 2724 - DNA, 279 bp, Bos taurus
  Clone ID: 12-LIB3058-048-Q1-K1-C7
gagcagccaaatgcccccgccctatataaaaagaaccgggcacacctcacctactcgctactctcacaacacacttgctcaccactacctcatcacaacaaactctagccactgacataaatacaccaaataaaaacaactgctcaaaccacaacaagacaacactagccagaacccagaactcaggcaatcataacaccatctccctgacaacaaccaaaagctagataaggcccaaaactaaactatcaacatacgccatcattccaacaaccttac

SEQ ID NO: 2725 - DNA, 429 bp, Bos taurus
  Clone ID: 12-LIB3058-049-Q1-K1-C11
aaaggaaggcaaagtgaggctttttttttgaactgtattgatcaaaaatgtattggagaaaacacttcattagagtttcccccaccaggattttccttccgcatagactgttatcttgtgccctttgtaagttttttgatacagaagagttatttctggaagctcttaagaatgaaaaaagtgtatgattattgagatggtgtatcgacaaatatttattacagtaatccagaaaaaaactattctaaccacctcacttcaggatgttcatttctgaataataaagggtctagtcagatggtgattggtctgtaatttttccagctgaaccatatacgtaccatcgaataggggtttgagaaagcacatgactctcttactgacatagcacgtagagtagtagttgttgtttagtcgctaaatcatgtc

SEQ ID NO: 2726 - DNA, 269 bp, Bos taurus
  Clone ID: 12-LIB3058-052-Q1-K1-C7
aacgatcccacgatcttaatggcaagtttgctgattgtacttactgaacatattaataggagatttacaacatttctaactcaagactattgaaacaaaattgacaaaaccttcttactcacttcctaggcttccccactttgcatgtgagatcattaagtccccttcccatctctccacactgggatccaacctcactgctgtctgcattcgaaacggcgagacttatacccctggactggcatgaaactcctacccttcaaaatgat

SEQ ID NO: 2727 - DNA, 413 bp, Bos taurus
  Clone ID: 12-LIB3058-054-Q1-K1-C11
gcatttcattcttggcaccagtaagagcttttggaaggaatagagtacaatggtggagactgttattgtgtggtaaaacactactctcggaatattagagaagtttcatttacctaaatgtctattcttaaatggaataacaaccacattggactaaattaagtacaggtacagcggctaccaggcccagaggttcaggaagataggggattcgaagctttagttttgtggattacagttttgagttctgtaatggcatttttaagctgccctgtttaagggtcacgagattatacctgagttcacctctgcataccccacatcctataaagttcctaacacatagtgagcacatcataaatatttgctgaatttttttttgaatgaataaaaggtagaagcagaaacttgtc

SEQ ID NO: 2728 - DNA, 451 bp, Bos taurus
  Clone ID: 12-LIB3058-056-Q1-K1-C11
caattagagaaatgtttgattttacttaaaatcacaggtcttcctcttgaattaaatttaaaagtgagatagtactaaaacttacatggcactcttctggacttagctatttcaggattcaaacaaggtatgacacatcagcatattaacctttttaaaggactgacaacgttgtttaataacgaatttggtgtgtatgggtggcattttccacatgagcaccccttctttttttcggtagtcacccagtgatagccttgttttagtatctaattcttgacagtaatacacatttccctgtaaactctgtgcctcaacacttaatcactgatgacaagcatgaatatgaagaagtaccaaactgtacaactgaacaatatattgttcaaaaactatatggtgaagtacagaaggtgatatgattgaccctcatgacttttctgtttgctgg

SEQ ID NO: 2729 - DNA, 112 bp, Bos taurus
  Clone ID: 12-LIB3058-056-Q1-K1-C7
tctagatcgcgagcggccgttctttattttatttatagtcagcattttaaaattttatgaagactgagtatgattaaatatatatatatagttatagtattatatgcccaat

SEQ ID NO: 2730 - DNA, 361 bp, Bos taurus
  Clone ID: 13-LIB3058-001-Q1-K1-D1
cgtttttgtaccgggaggtgccgtctgttcttcctcccccctctcgagtgccaagaaggtgtgggacggcctgcccttcccttccggcgcccctgtcccccggccgagtgcccgggctggtaaggacgctgccagctgagcggactgattaaccggagtctgtacatagtatatatcgctttaaccagcgcgccgtcctcatcccgctccggctcttgcctccttcgtgccagcctgctgcaacaccccctcccctcccgaccccaccccgacttaccgccagcagctttcggagaggacaggatcacgttctagaacacgtaccttttgccaaactgggctggttccgcgggcttcacgg

SEQ ID NO: 2731 - DNA, 358 bp, Bos taurus
  Clone ID: 13-LIB3058-002-Q1-K1-D9
gcaagatcccccagcggaagatcaaccagggccgtcgctacgtctccgagcacgggccctacaagtccctcgacgagctatgggacggcgagatatgagtaaacgttacgtcggcgccccgctaggcggctgccttgcgtgacggagcaacgagctcgccgtcgtgacagtgagcggctgctttgtgtggttttatgtcgtgccatctgtgcaacaaaaagtgatgctttagtgtcacagtatgtgtgaaataaattaaaaaggattttctggttacgccggtcaaaaaaaaaaaaaaaaatattaaaaaaaaataaataatataaaagtttaaaaaaaaataaaatataatttttat

SEQ ID NO: 2732 - DNA, 163 bp, Bos taurus
  Clone ID: 13-LIB3058-003-Q1-K1-D1
acggcgaaagattgccatcagatctgaagtaaaggagccttgctgttccagcccatgccctgtgaacccaggcccacaaactgcataaaatggagtgttggtggctgtgtacaataaatgccaaaaatttgaaaaagaaaaatgaagacactaatatgacaaa

SEQ ID NO: 2733 - DNA, 396 bp, Bos taurus
  Clone ID: 13-LIB3058-004-Q1-K1-D1
attcattgatttttagtgctccctgataaatgatgttattgacaaaagtaaaatctttcagttgggtttcctgtgttaatctctcttctcctgtgctcttgacagtgtgtttagtggatggataatatgtatttctcttccaaattccctgcctttttggcccaactcaccacaaaagctccatagtttattaatgtaagtttgaatggatgcttcttatgggaaactgcaagagttaatgaaagtgtttcataaaggaatgaaaatgtctcatgagttgttctgtgatggaaattggtctggtgttctgttaatgctgatggaaagaaacttacagtgcttaataaaagtctattctttcagtttaaaaatgtgaaagataccttaataataaaa

SEQ ID NO: 2734 - DNA, 234 bp, Bos taurus
  Clone ID: 13-LIB3058-004-Q1-K1-D9
gttctagatcgcgaacggccgccctttttttttttatgttctttttcacggccaccaccgggggcgcacgtttattgagacaatgtacagacaggccacggagacatagggccgaggctggggccagcaacgcaaaacggagtgcaaaaataaaaaggcactgatctggtaagaaaagacactccgagtgttctaagaatataagtcatttaatactggtaattttatagcaca

SEQ ID NO: 2735 - DNA, 416 bp, Bos taurus
  Clone ID: 13-LIB3058-007-Q1-K1-D1
gtgaatgctccactctttcctccatccacttgcctcagacttcctcctgaagttccccatttccactttatgctgagggcttccttcttttacctttctcttgttaatatcttccccatgctttcaacccttgggtctcacattttcttctttcctttatgaatctcaccctccatcacccttcttaagattcaaatactacagtttcccccagcctcagtccctttctgtaaacttaacatttcctatgcatgatcctcttctagaattgatctctctccattcattatatgcctgaattattgtcaagactcagcaataaaccatatgtcatatttagaaaaattaataagattgaaaagaatatccagggtggaaaattatcaaggtaaaaattaaaagacttcaaagtgggg

SEQ ID NO: 2736 - DNA, 346 bp, Bos taurus
  Clone ID: 13-LIB3058-008-Q1-K1-D1
cggacgcgtgggcggacgcgtggggtttactcaatggaattctatttttgtgaaatttctttacgattatgtagcaaaattcacctccatccctcagtcaaacttctggaaccaaaagtttgactgagggatggaggtgaattttggttccagaatcaaccctgggcatcgctcttttgaagaattctctcctgggtttctaaaatagagatgggcctccctcaagggccgaggtgggggaaagggtcgggagaaactgaagtctgatggtgttccattgagtcgacatccggaagctacaagtaggaagggctccacccgggagccccgaagcccaggctggttc

SEQ ID NO: 2737 - DNA, 419 bp, Bos taurus
  Clone ID: 13-LIB3058-013-Q1-K1-D9
ctctcctccacgtcaatggtaacggtgggttccactaatccttgctccactgattcctttctctgacaagtcccatcacctgctaaaacttaaatgaacaaacttacatgccattttgtgagtgaacactttgaggtttttaatttaaaggctgtgtacagttacttttttatattcccattcttgcattcatttatacttaaattatgacaaaggtcgatgtccaccagtggtcttgaggcagtgtctctgtttccatgctcttctgttaatcacccatgccactgcctggggcgagagccggcagcctggacagaccatgtttgaagcaagagattgcagtagaaagatgggaacacatggctgggtttccaaggtgaatgctctccgcgtttggggtgtccaaatgtgagttttgc

SEQ ID NO: 2738 - DNA, 351 bp, Bos taurus
  Clone ID: 13-LIB3058-015-Q1-K1-D1
cgagcatccgccctaaagataactcctatttgatttctgcttaccactgactttctgtgggggtggttttttttttaaactgggaatagggcctgccctatgatttccttcccggcatcattcaagtcatttatctttgcttcctcttactttcctacaggaccagagccctgtgtacatcagggcctacataggttgatggcagcctgattgcagtttggttcagttctgtaacacgttagatttttgtaaaattttgtccctttaggtgttaaccccttggtaaaatgataactgattgtgttgccggtagagaagtgttgggtttgcccagttgggagtgacttgggg

SEQ ID NO: 2739 - DNA, 302 bp, Bos taurus
  Clone ID: 13-LIB3058-016-Q1-K1-D1
gttttattgcatgttctttatttcttggtgtacatttgcaagatttatattttaaagaaggaaatatgaaagttgcttcttatttctgttaaactttaatgtgtttacctaaaatcagatggtttcttaagagtatttgtctaggctaaatgacattttttggcatatgcatcctgtaaagaaaaagatctaataaaaccatggtaatgttttaaaataagcatagtttttatcattcacggtgtatatgtaccttgtcatcacattgtacatcttaaaaaaaaatgcatggtgtacaacct

SEQ ID NO: 2740 - DNA, 122 bp, Bos taurus
  Clone ID: 13-LIB3058-018-Q1-K1-D1
caatagcttggtagtggattgcaagcatggagtccatgagcttaagacttgtgagaggggctaagggagatggaaacggtgactgaaaggaaggagcattgagtataattgcgcatagtaca

SEQ ID NO: 2741 - DNA, 368 bp, Bos taurus
  Clone ID: 13-LIB3058-018-Q1-K1-D9
ctagttctagatcgcgagcggccgccctttttttttttttttttaatcacgttttccttttaataaggctttttactcaaaagtgtagctttgaaaatctctagcttgttgcgacaaccagagaagccagagcggcctcgcctgaacacagcgcggggccctcacgggcgctccgagccagggtggagggcgaacgcaccgcttcacaatcagagccaacgcggaaattcagggacaggatacgcatgtcctactttgattccaggaagaaagacaagttcttagcacagtaaaaccaaaccccaagttaaccaatctttagaaatcacttgaaattgggggggggggtgggggggggcctccgggtt

SEQ ID NO: 2742 - DNA, 425 bp, Bos taurus
  unsure (367),(387): unsure at all n locations; Clone ID: 13-LIB3058-023-Q1-K1-D1
aacattttcaaatcaagtggatctccagaaagcactccttcaatttttgtaagtgaatgacaagtagccatacaagcaacaaactgagactttaccaacatctcactgcaaaccttttcttctggcaaaagaaaactatacagaaaatgcactgaattagactcataaaccccaagactgaagagagtagtttaacagaacttttcaggttttattattttaaaagtagaaataaaatgtttgcatttatgtacatattgcatgtattcatttcattatagattctgacattcaaaaacattttcttccatgaaaattattatacatgagtaaaatacagtattatcttagattctaaataactagnaccagacatttaccaagggntttacagaaaatactacatactaaataataattaaaac

SEQ ID NO: 2743 - DNA, 433 bp, Bos taurus
  Clone ID: 13-LIB3058-025-Q1-K1-D1
cggacgcgtgggcggacgcgtggggcatgggcagcaatggccttggcttcaggcagggtgtgtggtcaccgcaggcccagggtcgaggcttgtcagggcttgaatggatgatccctgtgaggggtcaatattaaagcaaaggtcatgttcggcttggagggcttggtggaacacctcaggtcactctagaagcttttaagtggtcagtgcattgtttgtaggccggaaggacagctgatatgctccttggtgatgtcctcggtgggcaccagccagtgaggagctctgtggtggggactgagggagttgtttagaggcgtttggaccagtgcggcagtcaagctgtctttctgcagtgaggaggactcaccaaacaacaaagagttaaatctgcctgctgaaggccgggatggctcctggggtaggaggtgtc

SEQ ID NO: 2744 - DNA, 376 bp, Bos taurus
  Clone ID: 13-LIB3058-026-Q1-K1-D1
gaatgtgcactgattcacttcaatatgttagcactctatgagttcctaaccagcagggtctatagagaattagacaatgtgggtacaaaataatgtccagcaaactagtgcctatgggaatacagaagtatagtcctggtttaatgaaaaaaaaaaaaaaaaacagagtaaacagcatctgaaacttcagcaaatcacttacctggtgtaaaatttttccttgaaaaaaataatttattaaatattaaataatttaataatccatttttaaaaaaataatatttatataatatttttaatactagaggtaaaaatatggggcgtccttttataggggatccaatattttttttcacttatattgctatattttata

SEQ ID NO: 2745 - DNA, 191 bp, Bos taurus
  Clone ID: 13-LIB3058-028-Q1-K1-D1
caagggggaggccagtgagcaaaaatagtcaacggttataggagagaacagcttactgtctgattcactcacttccctttatatgaagttgacagtaacatcctctcccttgctttatggttctcatactttggacacctctattttcacaacccataaatattacaggttagctatgatgtataataaaa

SEQ ID NO: 2746 - DNA, 221 bp, Bos taurus
  Clone ID: 13-LIB3058-031-Q1-K1-D1
ggcttacaacaaagtagtaatggtacactctaaaactatttgatgctatcttcggttagtgtggaatatacgcatagctgttgacccagcgatttcatatgttcaccagcttgtggattcagcactatgcaatggaacttgcttcagtgatgcaagtgctctattctgtgctatccatacagtatcttctagccatgttatctactgaccattttaatgtg

SEQ ID NO: 2747 - DNA, 446 bp, Bos taurus
  unsure (31): Clone ID: 13-LIB3058-035-Q1-K1-D1
gactcggctcactgcgggctgcagtatttcngttccatatccactacatgtggggcgtgccatggcgttctccttagtgacgctcagctccaaattcaacgtggtttgctctgtgtaaattgatctgggcctttgaagtattctttgctaactggcctgataagggttgccagtagagggcgcccgagagatgttcctcaagggaggaaaggcttttgctttgtggctctgctcaggggtgcttgctcagctgccctgcagcgcatggtggtgcagggctccccgcatctgctgaggtgaatcaggtggtcagcagcttcccctggcgccctccacccccaaccctgcacaggacagcctccactgaggtgtctctctgaatgcctctccaccatacccctgaaggtggatttccagtaactcccagggccccttaccaatgaatt

SEQ ID NO: 2748 - DNA, 394 bp, Bos taurus
  Clone ID: 13-LIB3058-036-Q1-K1-D1
cggatatgcaggtggtttaagtggtcatgtacttttgaacacaggcttgttctggagcaaacactaagacgatttgagtggagtctgctggtcacctttgcgaaagctgttgggaaagctcacattcaccttgcagcacatgatgccagaaatagcactgaagcaacaaactagccattgacggctcccctcttgagtctctgtccacaccactcgattctctactgtgactttggttcaggaaccttattatggtgcttttgcttttaaatataagaaaagagcaggtttgctcagtccagcgatcaaatactgaatccagattcccagtcatgaggcctcatcactcacttgctgagcccatatgccagcacccacagtacctcacttatag

SEQ ID NO: 2749 - DNA, 324 bp, Bos taurus
  unsure (33),(38): unsure at all n locations; Clone ID: 13-LIB3058-040-Q1-K1-D1
acaggtgggatgtgaatgcgacacgtgcttacncgaangcctataaccactatagaggcgagcacttatttaaagaaaagccagctccatgctaaacctacgaatgaaaggcatttctaaattcttgcaaaagaggattactctttaatctgacaggaacaatcctcccacattatccttatcccagatatggacaagcctgtctcttctcaatactttacacttccttttggaatataccaagaaatgcatttggagctatctttgttatctatctctgtaaatttagattctggaatcgggtttgacggtgtgaagcgttgc

SEQ ID NO: 2750 - DNA, 420 bp, Bos taurus
  unsure (40),(45)...(47): unsure at all n locations; Clone ID: 13-LIB3058-041-Q1-K1-D1
aggggataatgtacttcagtctctcatttatatgtccagnatatnnntcttaccattggtggtaggacaactaaatatctcaatcagtatttttacctaattagaaaattctcaggaagttagagtcttacttaagctgaaaattttctctttccctatctctctcatgcacatataaacgggctacttaatgaaatacctatttgctgaatataacagttaatccaagcttcgtctttaagtatggcatgcataaacaaagcaaatccttatttggtaaaacatccttgacaaaatcttctttcttaacttcacgcctcaatacatgggtcaccatgacaccaaaattgggctgattcatcaagcttaaactttcttggatttaatagactagaaattgagtgcagccccatccctaaa

SEQ ID NO: 2751 - DNA, 411 bp, Bos taurus
  unsure (342): Clone ID: 13-LIB3058-042-Q1-K1-D1
cttatattttctgtataaattttctacttttaatttctattccttgcaaccaagaatgctagttaaaaaaaaaaaaaaaaaaagatcggaagtgaagtatcacaagataatagtttaaccagagaatgtattagaaaagcgagaaggttccatatttcagattggaatgtttgaaatattagacagtaaaaacaatgttttaaccacagcttttgtatttttaaagttagaacatgtatatactaagcacaacaatagtctaagaaaacattgaaatcctggccagcttcagaaagaaaccaagaatttggcttgggctgataatggctattttgaagcagntggggggaaaaaaaaaaaaaaacttaatcattgttaaaaagagaactcctttgaattatgaaatctaca

SEQ ID NO: 2752 - DNA, 266 bp, Bos taurus
  Clone ID: 13-LIB3058-047-Q1-K1-D1
actcagcctcaggaacacctgagcccgttgtattgaggacccagaactagacaaaaacggatgttcctgcaggctgagacttcaggctgaaagctgattcagaccgaatgagacaggtgacctgagggcacgcaagcgtgtaaaacagaacagcctattggggcggtggctgcacaggagcttgcgtggaggccgaaggcgagatgaggcaacttctgagtcccttcctgtccgaggccgggctgtcaccaactttgcttggatgg

SEQ ID NO: 2753 - DNA, 188 bp, Bos taurus
  Clone ID: 13-LIB3058-051-Q1-K1-D9
gatcttccctctgcagatcaataaatataaaatacacgggaaacactgggagagtcacagaccacagcactggggagattcctcgaggatgggaggggcactctcccagtgtttcccgtgtattttatatttattgatcttccctctgcagattcatttctttgtattaataaactttaacaagtggg

SEQ ID NO: 2754 - DNA, 440 bp, Bos taurus
  Clone ID: 13-LIB3058-052-Q1-K1-D1
gcgagcggccgcccttttttttttttttttttttttttttttttaaatgtcatcatcatagtcttttaatattttacataaaaaactgtatacacagcttatagaacttttatgtaaacatcataagctcaccactgtcatttgtcagtttatttaaaaaataaaaaaaacaagacaatttagtagaagtaccaccggatggggaagggagggggagaagagacacaagggggaggtttattctctgtacagagatgcagagaaaatttcacacagctttagagactgccttgagggaaaaaaataaaaacaacaaaaggttttagataggccctaatactggttactgccctttatcaaaagagtgcgcatacgtgcacaaataaaaacgcaaaatagaagtgttggcactttttttaaaaggaaaaaaattagggggt

SEQ ID NO: 2755 - DNA, 411 bp, Bos taurus
  Clone ID: 13-LIB3058-052-Q1-K1-D9
ctttgacgtcaagtggttatcaactcataactgaaaattaacaatagtttgagtctcatttaggtattagttgaaaattttaaatggccggaaaaatacaaatatccaaatgatctttcatgttttctagtaaaacaagacaagccagtacttgaggataatgcttaaaaacttagtggaaacccacagacggacttgcttgacctagttaacttccacagtaaaagccatttaaatggttaggaattttaaaaattcaagtgctagtacccttggcaagaactgtcccatgatttgcctcaaagtaatagtcagctacttttcaactcatgatactgatacctaccgtacagagtggggtgtaattgtgccaatttacaatccagaagccatttaaccaaatgcagctta

SEQ ID NO: 2756 - DNA, 414 bp, Bos taurus
  Clone ID: 13-LIB3058-053-Q1-K1-D9
gcgccgagtccgcagtggccgccacggtttcacgactcggccgaggctgcggcgaggctgagcgactgcgaggacgcaccggtccggccgctgtgcaagccccgcggcatctgctcgcgcgcctacttcctggtgctgatggtgttcgtgcacctgtacctgggcaacgtgctggcgctgctgctcttcgtgcactacagcaacggcgacgagagcagcgaccccgggccccagcgccgcgcccagggccccgggcccgcgcccaccttggctcccctcacccggctggagggcatcaaggtggggcatgagcgcaagatccagctggtcgccgacagggatcacttcatccgaaccctcagcctcaagccgctgctcttcgagatccccggcttcctgagcgacgaggagtgt

SEQ ID NO: 2757 - DNA, 189 bp, Bos taurus
  Clone ID: 13-LIB3058-054-Q1-K1-D1
atcgcgagcggccgtcctttttttatttattttttgttccattaaaagtgtattactggatttcaatactgaagaacagtgcatactttccttgagaccgggggtgacagctataattgttggttgtggccactaatggaggtcagtcagtacctcctgcctaatgatgaaaatgaggaatgggaaacg

SEQ ID NO: 2758 - DNA, 443 bp, Bos taurus
  Clone ID: 13-LIB3058-057-Q1-K1-D1
gtaaaagcccccatttagggcagcttttttctttcctttgtgagacataaaacatctccaggagccatttgcatgcagggcttatctcaaatgaccccagtgatctgccaggaggggttgttttttaggttttctgttagagaacacctaaaagtataagtaccttcagggaccaaatctcttttgtttcaaagaaagaaatgagctttctcttgatttacttccaaattagttttttttttttaagttgctgttgttgctgaaatgtgtatgtgaagtttccagacctcaacataaagtgattaaattcaaaggtgagcaaatcaagatatgataaaggcctgctgccgtgcaatccatctggaaagaagaaacacaaatccaagagcatatcacaggatgtcttaaacttttcagctactctaacaaactaccttaaactg

SEQ ID NO: 2759 - DNA, 255 bp, Bos taurus
  Clone ID: 13-LIB3058-058-Q1-K1-D1
ggcccaggagaggaccagccggacgaccccttactctggagggagtccccagggccgggacacaccagggtgtcccggaaagaccctcctgggcagcgacggcgccccccacccagccccgatcccccacgacgacggcggggggccctcgggggcagacaaaccacacagccaagggattcgaattaactcagccatttttggagaaccttggggaaaatggaaatttcaaaaaaacaaaaccaaactataacc

SEQ ID NO: 2760 - DNA, 122 bp, Bos taurus
  Clone ID: 14-LIB3058-002-Q1-K1-D5
aggtctgcaaattctgcattctgatgcttctcaccaagtccaaaagctttggctttatcctaactatggctaccactaataccatgagatctttctcttccaacattttctacagacgaatc

SEQ ID NO: 2761 - DNA, 126 bp, Bos taurus
  Clone ID: 14-LIB3058-003-Q1-K1-D5
gttctagatcgcgagcggccccctttgctttgttgttgtattctatgtcttcttgttgaacccattttcataaactgcatattaatgtgattgtcgttggctgtgtacaataaatgccaaatattt

SEQ ID NO: 2762 - DNA, 398 bp, Bos taurus
  Clone ID: 14-LIB3058-003-Q1-K1-D9
gtcaggtcagtgttgaggttgctgaagatgattgtgattcgataaactgccatttgtagtctgccaggttcttcctgcattttaaaaagcaaggtcaaagctaggcttccagacaaccttgttcctctgggtgtgccctcagctggaagtggctggttctgtgctggagcggccagatctctggcccagctcttctccacgagagccttgctctgagtccagaaaacaccctgggctctacctgtcctgtcctgcacaacagtgtgttacctcttgtctgctgcctatttgattagagtctgaaggcgcttttagaccaggggcacaattgtctctctggtgctcattactactcatagaccacgttacatttaggctaaaaacttccagaaattgct

SEQ ID NO: 2763 - DNA, 263 bp, Bos taurus
  Clone ID: 14-LIB3058-004-Q1-K1-D5
acttacttatgacttctcttgatcacgaaaaggaacaggctctacaaattcatgaactgcttgcattgaaagaacaagaacacaggaaagacattgaaacaagggagttttttagtgaagctgaataccaggactccttaactaaagaaattgcttaagaagacagaaagcctgagcaacttattaaagaatatcaagacataattgatgcattagatcaacactgtatggatttagaaaatgaattccgtattgctttaact

SEQ ID NO: 2764 - DNA, 439 bp, Bos taurus
  Clone ID: 14-LIB3058-005-Q1-K1-D5
cggacgcgtgggctcatctgtcgctgacatgtgtgtaacaaatgtgactgtgcactggcacacagggctgcagggcacgtgtgctcctcagaccggcgtatctgaggacatttcaggctcctccattgcaaagaagggccagcccccaagtccactctgattgtcacaccagggcaccctttggattttttgtttgaaataaactatttcagtgatccaaaaccttgagctctcaatgcataaactccctggacaccagacaaccccctgaccgcgcccctgctgatgctcatggtggggtgtggtttatccttgcagtgggattggaagcctgcttctagtgggaaatctccataggctgacggccagcgtgtatcacagggtgtgtgtcaccttgcttctgacccggccccatggaaagtgattggacatgaggagc

SEQ ID NO: 2765 - DNA, 355 bp, Bos taurus
  Clone ID: 14-LIB3058-006-Q1-K1-D5
cggacgcgtgggcggacgcgtgggcggctccacaagcctcagatcggggatcacatcgattaatacgtgctgctgacatagattactttgcaacatcaacgcgatgcaccgagcgcctcacaccaacaccctgttgctgagcctatggcttctgctcagcctgatagtggctctgctcatgtttggaccctgactgcccatacccaattgccaaaactcaggaaagaaggaaagcccagacccaagaggatctaaaagcctgcgcctatgactcctcaccctgctagttctaccttctcagtcctgggtccccacaggcaggcctggtcccctgtacccacacctgttaacttcc

SEQ ID NO: 2766 - DNA, 204 bp, Bos taurus
  Clone ID: 14-LIB3058-007-Q1-K1-D5
ctaatccaggatggacatgggttcacgttcagctcttcactacggtaccgaggctcattgcatgctcctggcatgcttcattcaagtctgaatggctgatctctgcccgatgctttataggctcgagcctaaccatgcctagtctagtcgatcctgctcatcctccatcagcattcttaggattcacctactctacattcccaa

SEQ ID NO: 2767 - DNA, 369 bp, Bos taurus
  Clone ID: 14-LIB3058-008-Q1-K1-D9
atcgcgagcggccgccctttttttttttttttttttaagtagcagtattcacatgtttattgagcagtaaaaaaatatatatggtcaacattgttactttcatttgcaaatggaagagttggaccttatacaaacctgtacttgactttttatcaagagtacttgtcatcaaattactcatatctaggcttcttttggtcttcgagaggcttctcaaattcgctatagatgctgggaagattaaaattgagcctgaattataaaaaaagctgagaatgaatacagtgccctaggaatcagaatatgacaaaatgaaggatcccacctttgatgactgggaaggtattccaggacccaaggcttgggaag

SEQ ID NO: 2768 - DNA, 378 bp, Bos taurus
  Clone ID: 14-LIB3058-009-Q1-K1-D5
cgcatgctctgtgaacccatacctctctagatggagcaggtggccactggtgcctggggctcagtacttagaaccactacatcccagctacctacatagctgtcggctctgaatcatagctgggcagttttcagtctcagaaccctgaccctgcaggtggcgttcagccactacctggaccgagctgacagatgttatcattttgtgtgtctgcatcataatgtttgtctaaggtttggactgtgctgtgggtaaccttccctcatcatagagttcggtgccaattccatcacatggtcgtcgatcccatcgtacgaagtcattgcatggactctggaaactgctgccaatgaccgattcctgactatccagtcacct

SEQ ID NO: 2769 - DNA, 259 bp, Bos taurus
  Clone ID: 14-LIB3058-010-Q1-K1-D5
tctagatcgcgagcggccgcccttttttttttttttttttatttttttttttgggctggtatttttgttctgtttttacatcacaacattgtttattatgtgaatattttacaatagatacaaaataattcagaaatgcactatttgaatacacataactgcttttatggatcatatttaagtattactaaggacctaacagctattttatttatacccaaattcagagtatgctattttattacaaatgacatttttt

SEQ ID NO: 2770 - DNA, 422 bp, Bos taurus
  Clone ID: 14-LIB3058-011-Q1-K1-D9
gaaaatgtcttttgcattacagaccatttaagaaaaaacaaaaccccccaccaaaagtaaaagacaacccccaaaccaaaaacaaagctcggaaacacagtaagaagcgtatgaggagaatatttagagagtgggcaaggggtacaattttgcaaataatgtggattttaaaaatgaacactaaacaaggtgtacgtgtttttttttttttttttaagttactacgagtattttaagtaccaccgaaaaagggaaagaaaacaccccactcattgattttttttttttttttttgtggtgggggagagggagtgattttaaacttacagaattctggtaactttgcatttttttgtaataatttttacattttttcttatttttgatctctcagtactcactaaacataataggctgacact

SEQ ID NO: 2771 - DNA, 386 bp, Bos taurus
  Clone ID: 14-LIB3058-012-Q1-K1-D5
cggacgcgtgggggagctgggaatttttgataactgttaaggacatcaactatattggtaaactgaagtgcagttgatttacattcctgtatttgttttggggtgtacaacacagtgattcaatatttttatgaaataaactctatttaaaggtatcacacacacaaaaaaagatgaaaatacacagattcaacaattctcacaaatcctaggaagagaaaaaataaatgtgcatctgggcacatcacagtgaaacttcaggacatgaacaacaaagagaaatctgaagagggtacatttaccagaaggtaaaatatatgttacatttaaagaacaacagaaagttgagtttttcagaagaaataatagaaacccagaatcagatc

SEQ ID NO: 2772 - DNA, 358 bp, Bos taurus
  Clone ID: 14-LIB3058-012-Q1-K1-D9
aggacgcgtgggttttgacactagatctttaaagcctcacaggcttccttctggctgattctagaaaagctggatgccgcccaatctactctgttgctgccttcgcttctgctagctgctacggtggtccttctgggagaaagtttggaaaaccagagacctggtcattaccaagagggtgcagtgggcagaagctgcgtagctgaggggctggagaaggatgcttgtagaagcaaggctgtgagtggtcaccatgctggtgcacacaggatatctttagagattcggcaggagcctgtgtccagcatgagcttctgggaaatggcctatgagggtatgtagctttctttatttaaaa

SEQ ID NO: 2773 - DNA, 431 bp, Bos taurus
  Clone ID: 14-LIB3058-013-Q1-K1-D5
cggacgcgtgggctgcattcatcccttgttaatggtgatgcccttcctgaaaggaaggacgaaggaagccacagtcaagagtgtgctaattttttaatttaagtgttggtcttatctgaaatggaaaccttaattataaaacacaaggcaaaaaattacggaagaggaacttagagaatctgttccgaagggagtaatggtttagacagcactagtgtgcttcaaaatgtgaagaggcaggtcagacattgagagttagaatttaggactgctttgtccgacacagtagcccatacgtacgtgtggatatggagtaattcaaatgtggccagttataattgagacagactataagtgtacaacacatataagagtagaaagtcactcagtcgtgtactactctgtgcgaccccatggcctatccagtccat

SEQ ID NO: 2774 - DNA, 219 bp, Bos taurus
  unsure (17): Clone ID: 14-LIB3058-016-Q1-K1-D5
ttccggtcgaccagcgncgcagaaatgggtcgacagcaaatcctcctgagatccatgtgtgagagtggtccagcagccttacccaccaaaccccggggtgaggggcatcccgagggaaacttcactactgatcccaagacccaatggtcaagtgaacaaggtcaatgctttacctccaaagtggtttcaaggttctgaaacatgaagtgctaacccagt

SEQ ID NO: 2775 - DNA, 279 bp, Bos taurus
  Clone ID: 14-LIB3058-017-Q1-K1-D9
acggctgtttttggtcagaggtcctaacaaccgcttccagtgagagctgctaagaaaggttatgaggttgcatagttctgtggctgtttcaaacgggtactctatggttatttgccttatttacgatgagggactatgaattctcaagcactcagactcatccatatttgagtgtaaattgctacagacgtttcactaccaattatactgcttctatttaccatctctattctggatcattgttcgggtccctgggggcttaatttaaataatgtatat

SEQ ID NO: 2776 - DNA, 467 bp, Bos taurus
  Clone ID: 14-LIB3058-019-Q1-K1-D5
actgaatactgtgataatactttatcttctttatggaaaatgttgtcctgcatttattaggcaaaaacttgtgaatggagttaactggaaaatatatatgaatccaactactgaatataaatggtattataataaaagtgtgtcgtctatgtgctaaatgtcaatatctaccaatgcatatataacctatagttgatacactgattgattcacactttgatcgtggctggatttttgttcctatctataaaaaaaatcttcaaattatctgaaatgcaaaatgtctgcttttgtgacagaaaatacacttagaatacaatgccacccactgttatctcattcatgtggtctgttcagctgatttacatatttaaagcatatgggaatgttagtcaaacattggtttgtctggtatttatgtcagtctacagagggttcgcaaatttaaaagctcttttaatgtaatg

SEQ ID NO: 2777 - DNA, 330 bp, Bos taurus
  Clone ID: 14-LIB3058-020-Q1-K1-D5
ctagatcgcgagcggccgcccttttttttagcttttcctaagatgctcactgttttaacgcacagcattcttaaagccgctcttgaatctggacctacattgctactgccttacggcttcggtgtaaagcgaccccgaaggcctttggtaggctcaaagcgtcctgagactccggatacggtccagatacatttgaactgaaaggccccttgtaggcctaggacgaagtgacactatgccaatgcctttactttctgctagaccaggatgagctggccaaaggttgagcagcggcgcccacggcgtgctgcccttacaggcagttgaggc

SEQ ID NO: 2778 - DNA, 364 bp, Bos taurus
  Clone ID: 14-LIB3058-023-Q1-K1-D5
gcggcctgccctctgaggaggaggacgaggtgttctacaactgaggagggccaggccgctcccgctgtggcccggcaggcagcccggagccatcaggaccccgggcgctgggtgggcgttttgtgacccctcggggcaggcatggggttggggcggcactcctgtggacactctgtgcctgccggacctcctccgactctctcgtgggagccgtgatccatttacgcctgtctacctggctcatgagggcgccttccctgaagggtgtctgccatggacaggctcgaggactctcatcagacactaggacagactgctcagaggagccgacagccacactagggcgtggggactgcgctcagtc

SEQ ID NO: 2779 - DNA, 128 bp, Bos taurus
  Clone ID: 14-LIB3058-024-Q1-K1-D9
gagacccgcggcctcgcagtcacaacgggaccagggaccgctaccggaagcgctatggacccttgcctaatacagctcggccttcgagccggctactcgaatctaagctaaatgaccggcttgtacat

SEQ ID NO: 2780 - DNA, 378 bp, Bos taurus
  Clone ID: 14-LIB3058-030-Q1-K1-D5
actgccgaaacccatgactgttatctccggcttggcaggagttgggttctgccgggaatgctgctctgtgcgcgtgagaagggtattttctgtataatgggcatttccagggcgagctcacctttaataagagcagggagccagcacttggcgtgttgtttttctccttccagaggcagcttgataccctccgcccacccgcgcaggtccgtcagtattcccagagctgccttctcaagcagtcaatccagtagcctgttccccttccacccaactgatcgggcatttctgcactaaatatcctactttccgattcaccctcaacccacccccttccacactcatcgccaggccattctgagggcgcctggcccaaca

SEQ ID NO: 2781 - DNA, 322 bp, Bos taurus
  Clone ID: 14-LIB3058-030-Q1-K1-D9
acggctatgggagaactttagactaggaattggcgtcggggtgcagggtgcaagaatctggataggatcttatcggtagggatagaagtgctatatatgatacattgcacgcattcggtgctgggctgcacagccatagcacaatgctggcgcttctgacggccgaataatgctccaagatgacagatgtgctcgtgtggactagcaagccctgcctgaggctagcggatcattttcactgatatgatggacattgcaaaagtccgttacctaggtcagctgggacctgacaagctacaatggacagcacgttaatgagttg

SEQ ID NO: 2782 - DNA, 379 bp, Bos taurus
  Clone ID: 14-LIB3058-036-Q1-K1-D5
atcgcgagcgggcggccaatttttaggtagagccaactggaagcaagatgaggatgaagtgcatttggacgaatagacagcgaaggatcaccaggaccaatcttaaatgaagagcaatggctacatgggtagaaaggggctagccacatcagagttcaaccctgctatagccacatcagaagccaaccctactctagtcacatgagaacctaaccctactgtagacacagcataaccaaaccctactctagccacataacagctaaaccatactctagccacatgagacttcagccgtactctagacacatgagagggcatccctactctagtcacatcagacagcaaccctacatgtaccacatgacacatcaaccct

SEQ ID NO: 2783 - DNA, 369 bp, Bos taurus
  Clone ID: 14-LIB3058-037-Q1-K1-D5
gttctagatcgcgagcggccttccgatttaccttccaatgcactgtctctaggcttggcacattctcacatatatccacacacaatcaatatacattgttgaaaaaaactaaaccacacaaaaccttcaacctaaactcatcaaatatccaaataaataccaatataataacacaaacacacatgaaacaaaaactacatattaaacatgtagttctattcatgtttgattataacaaatgactcaatgatagagcccgaacgaaatgattaagcccatggtaacactaccctcccagatgccacatgagatgacatgtcccctccactctacaactctaccctccccatctttatatgctaagagaca

SEQ ID NO: 2784 - DNA, 426 bp, Bos taurus
  Clone ID: 14-LIB3058-038-Q1-K1-D5
gcaggtcagaggtgacgaccgagagtgctttctggggagtcacagggaaggcctggatgcggcgcattctagcgcatttctctctttctgtaaatagccgtgtatagaagatggaagagtagcctggggtttatccagagatgagtttgttttttttgttttttctttcggttgtttttatattacctcattcagcaagtttatgtttcacaatgactcaatgacgctttatttatattgtttgtactgtaattaaaaccattgacagacatttcactttgcttgttatttcatatgagcttgttttgattaaatatgccagtttgtattttcctgccttgggattttttgtgtcagctgtacagtattctaaggggaaaaaaaaaaggaaaaagaaaaatgtgtaaagtaatggaaagaggtggc

SEQ ID NO: 2785 - DNA, 426 bp, Bos taurus
  Clone ID: 14-LIB3058-039-Q1-K1-D9
cggacgcttgggctgtactttctatcatttttgactgggaagtgcaaggagaggcttggcccacatggaggctggctgagccaatgtggggggtgggtaaggacagtgccaacccctccttgcccctctgcaccccagggaagccctgcccagggactttaggccaccctccgactgtgctgggctgttcagagtgtcagtgtgggggttggtccacatggggccaccctgcttcccgttcttgggtctagggggttaaaggctaagcgccctcttcctacacctcacatctatacgtctcactgcggcatcgcatttctgtcccagggatcctggcttcttccaaatggactctgtaatcagcactgtgttattccagttacagtcactgtgtccgtaagaaatgtcaatagccatttgttgggc

SEQ ID NO: 2786 - DNA, 424 bp, Bos taurus
  Clone ID: 14-LIB3058-041-Q1-K1-D9
atgggttgaaaataaacctgaaacttttcacaaactataacaagcatttattaactaggtagaaaagatgtttctatatattttgtatatctatgaatattgcatatctaatctaaaatactgagacaaattcttctgtgatgcttccttatcatgctcaattatgtttaaaatcttgggatttcatttttaacctcaatagataacagaaaaaaattaaccttaaatgtttacattgagcttttaaattaaaaccaacccaaattaagtgacctatagtaaattaatggcagtaggggtggaggcgttaaatttattggcatactacatgacaatgtatctgtatatttaatgaaatattacatatcatagcacaactctgctgggtattaagacttcatcttagtatttccctgcattgctc

SEQ ID NO: 2787 - DNA, 422 bp, Bos taurus
  Clone ID: 14-LIB3058-042-Q1-K1-D5
ctgttttttaatcacctctcctttgatttcccttgattcctcttctgatttctagtttgagttctggaggggttatctcctccaccccttgccctgtaattttcagcctgggccttggtcatacttcccagaatccaccgatccaagccctcctcttcataggacagttcatgaagacactggggattgagaagctcttctgaggctaagttccgaaagcatggggagggggaggctagcactccactcagccttaaacgatgttgagggggccagtcagggcccctcaaagcagagtatgctgcagaggcccctgttctgggtcctgagagggtgacctgctgggctggcagcagagccagggctgaggcccctccgttccacttacactgaagcacgaggagcctggggacacctgaatg

SEQ ID NO: 2788 - DNA, 434 bp, Bos taurus
  Clone ID: 14-LIB3058-044-Q1-K1-D9
ctttgtataatgccctatgtacctcaatttctcaatatatattaaactctagggaagcggatattaaactctagctcttattgtccatattagaagtttccaagaagaaaacaaatgtggggaggatttactaacttgttcaatttgatgtagtaggtctacagttgaaatgaactgcaatttctgctttaagtgtattcttccagtaaccggacaatccttcagtagtatattcaagctaatttgtgaggtctgaaaagtgagaagggagaaaagaacgtagataatatttaatttcaaaggacagttcttcctaattttctcttttgggtaagagaggaaacaacgaaaatattatagtgtgaactatcacttggaagaaatcatctacatttaagactaattaaaatatcagcatttcaattagcatggat

SEQ ID NO: 2789 - DNA, 394 bp, Bos taurus
  unsure (38): Clone ID: 14-LIB3058-046-Q1-K1-D9
cgtccgctgccatgaccctgatgccacccttacctggncaatgtggggagaagccggcgggctctggtctctctccacgggcttggctgcttggggccgcttcccgcctggagaagagcacagggcgcctgccccctcctcctgtgaacagcctcctaagtgccgcccgccccgcccctccccgctcctccagcccacgtgcggccgtctcccccaggaagggtgctgtcccgggggcttcagtggcagtgagcctcccgcctcgggtgtgccagcagggtcagggccaggcccagggctgtgcctccacccaggctctaacctgtgccttacttgccttctcccagctgctccacaggccagcagaaggcctggggcagatgagggtcaccaa

SEQ ID NO: 2790 - DNA, 418 bp, Bos taurus
  Clone ID: 14-LIB3058-047-Q1-K1-D9
tcgcggacgcgtgggatcgcgagcggttgcttttttttttttttttttttttttagtatagaggtcctagaataatttttgggtttagggttaggagtagtaggggtaggatgtgggagtggtaaagttactaaattatgtgcattttatttctagttgtaaattcctctagtgaagacatgttactttctttcacactataactgagaaccttcttggcttaacccacaaagcactgatgaataaccattggcaatttgtaactagtgaggttaattttatatctaaattagttgagtttcttcatttctaatctaaagaatcacacaaagtaggtacaatgactaagaatgtactcagcatgtagcatttctcaagagctacttaataaagtatctgtggtcagtgttaaaactta

SEQ ID NO: 2791 - DNA, 415 bp, Bos taurus
  unsure (26): Clone ID: 14-LIB3058-048-Q1-K1-D5
cggacgcgtgggcggacgcgtggganctcgagcggccgccctttttttttttttttggtgatggtgataggtaatgtaattttattacaaatttcaggatctaaaaagtaacctgttacattgactaaggtaactctgagatgacccgtctcaggcacggtcctgttagtgactcaacctcgggagaagagacacagtccccccgccccccctgccatgtgaggcgcaggccgtgcacggggctatgccgtatccccagcacatgccgaccacaacctccgtggccgtcgctctggcatctgggctgtgatgagctctgtgtgagcctcctgctggactctgaaagacaagcaggagcctcaagggtggcccctctcctgctttttaacttcaatggtatttaggagactgtgct

SEQ ID NO: 2792 - DNA, 419 bp, Bos taurus
  Clone ID: 14-LIB3058-048-Q1-K1-D9
cccacgcgtccgcccacgcgtccgtctttatgtaagaaaagtaaccctcaccaagctgctatggactaatactttgcttgcctaaatccgtgtcttttttttttcacatccatatatgacggtgtctagaaacccattatgaaaatcacttgaaaaactgttaagtcatatattacctttaaaagcctaatgccttttttttttcaattataaaagattataaatgtaaaccacaggctcgcctttaagtacactttcaatttctttgaattgttagttattgatggcctcacttataaacactaaattctgtcacctcctgtcattttattttgtattcattcaaatgtgttttttcttgtgtatattataaaactatattttattatctcctacgtaaataaatacttgcaaatgac

SEQ ID NO: 2793 - DNA, 440 bp, Bos taurus
  Clone ID: 14-LIB3058-051-Q1-K1-D5
caagggccttggattccaacacagtttcttccacatcccctgacctggctagtggggagtgggatgcctggctgggccgggggtcagggagaggtgggtggcacatgttgtcatctcctctcctcccctccccacttccggtgctgaggctgcacccagaccctgggccaggggtgctgtggccgctaatggcatgtgctctcattcagcccgcccccttcagagggaagtggtgttgcccgctgtccttttgcctccacaccgaggttggtgctgtgtttttgagggatggtcctcttttctcccgttgctttgtatttaaggactggggcagtagcatggggcccttccccagcttcctgattccctcccctcgttgtgggggggggccatgcgtgataaacttccttcactctctccatgcttttccagtggggggc

SEQ ID NO: 2794 - DNA, 407 bp, Bos taurus
  Clone ID: 14-LIB3058-052-Q1-K1-D5
gaagacttctctgaggaagtgtggtgaatgagacctcctatgagatgatgatgcagcgtgtgtcgcgcatgctggcccaccccctgcatgtcatctcaatgcgctgtatggtccagcttgtaggacggaatgccaagtacagcggcgtgttgagctccattggcaagattttcaaagaaaacgtcctgctgggattcttcgtcgggttaatccctcaactcctgtgcgatgtggtattcttgtggggctgtaacctgctggcccacttcatcaatgcctacctggaggatgacagctttagccaggcgctggccatccggagctacaccaaatatgcgatggggatcgcagtgagcatgctgacctaccccttactgctggacggcgatctcatggctgagaacaac

SEQ ID NO: 2795 - DNA, 400 bp, Bos taurus
  Clone ID: 14-LIB3058-054-Q1-K1-D5
gggtgctggtctctgattccttatgcttgaagcgtctctggtggcctcaggccctgcacagcaggatctctgtcttctgattggcttgtcctgctgcccccggcctggcactttcccctgggggactggttcttgtcaaaacaagcttggccaagcgcccttaagagaccccaccgtgttccactggttaatggaaccccgggtcccttcttggctgaagccagactgtgccacccaaagcttggggccctggttccgccggttttccaagacccaaagaccttggcctttggcaagactgtgccgctgtcctattggttggtaccttgcaagcctctgtaccctgtaacctgtcctctagctctgtgtgctctactctgggaggaggagtcctggggct

SEQ ID NO: 2796 - DNA, 261 bp, Bos taurus
  Clone ID: 14-LIB3058-056-Q1-K1-D9
gagcagcataactaatgggcagggaggagctgtaagaatagcagccagagattgtatgctatcacatttaaggctacgcccataaagctatcaatatatatgctaggagagaccttgcagcccagaatagcatgggctgatatattcaaagtgcttaaaagacttaatgtaaccccaaaaacctgccttttatgctctacttaacttagatattctacacaaatgaaatagctataaaatttcccaagttaaacaatagct

SEQ ID NO: 2797 - DNA, 418 bp, Bos taurus
  unsure (404): Clone ID: 14-LIB3058-058-Q1-K1-D9
ctaaaacatagtctattaactacaaacatttttataaaatatctacaagtttaaaagcagcactaaactgcacgtagttcaacatggatcttcaagccctggctctatatcctctgtactactccgcttccctcttgtctctgtaccttccttcatgccgtaccttctgcacttcttcatttcacccttttctcaatgcctgctcatttgttaagactcagctcaggccacaaattctttgtattcccataataaactattacatctataaaattacagttttctgatcatgtattgtttaacttactaaattattaactccttgagggcaagggctatgtcttattcatctctgtatctccagtacctaatgtattttatagtaggtgctcagtacaatgttngctgaaggaataaa

SEQ ID NO: 2798 - DNA, 134 bp, Bos taurus
  Clone ID: 15-LIB3058-002-Q1-K1-D11
atagcctttaacatccaccacctcgtggtccatataagggctcattaggtgataccagtgctgtgtattatatcacatatggcaccaaatattaatgactttaacttggctcagatttagaagagcgacagcat

SEQ ID NO: 2799 - DNA, 450 bp, Bos taurus
  Clone ID: 15-LIB3058-002-Q1-K1-D3
cggacgcgtgggtctgcaaatcctgcaggctgttgcttctcagcagggccaaaagctgtgcctttggcctagcagtagctaccactagtaccaggagatcttcccgtcccaacatcttcgacagaggaatcagctgtgggagctcgtgaggcagagggcgggcagagacaagatggagaaggaacacatcaagatggccatgctgaggcaagagcaaacattcaggcagcaggttcacgagctgcaccgcgtgtaccaggttcagaagcagctgatgacgcagacgcagattacccagcaccaccagcaacggtgtggtagctcaggcaagacggaggaggaggaggacttcaacctggagctgacgctggcaacaggggctggaaggacgcggcaggagaagccatccacttcagactccgaagcgaccatgtcgtcgtcgacatctgc

SEQ ID NO: 2800 - DNA, 428 bp, Bos taurus
  Clone ID: 15-LIB3058-003-Q1-K1-D3
gcgaatggagggagaaccgccttcagcgactactcggagtcagtcccctgcacgcgcaggggcagccagcgggagctgcgcgtggaaaccattgctggctcctacagtagcacacccattcgcaagcagtccaagcggcgctccaacatctttacgatatgtgccactgtttccaactgttcatcgacaaaaagggctttccaactgcttccaaattagaagaccaggtggtgacacacagcacctgtggacattgtcccgagtgcggggccggtccctgggactgctctcagatgagaagcggccgccgtgctccacactccagagacccacaggaacgcttgtaactaaccgccacacccgcaggcaaggctaggaactgctggagcgcctcgacagcccgcgcggacagcctggcggaactcaca

SEQ ID NO: 2801 - DNA, 415 bp, Bos taurus
  unsure (409): Clone ID: 15-LIB3058-004-Q1-K1-D11
cacagtcactgtgctgtctcttccactgctgcctctgcaggcttggtccacacccccgcaccgctcatctaccacccccactccctctctcacctcttgccctacaatggacataacattcgtcctaacaggtcttctgagcaagtgtccaagagaaaagggaaaacgtgcccactgcctggtagagaccacagggattccaaacagcagcaactggagagtcagggcatgtaactggatcacccggagatgccccaggcctgagcattgatattctggtgttgatttttacaggaactgtctgcttatgtcaccaataacaggtttttccttgtggtagtgagacaaattggaaattccaattactcagggaaatgaatgtgaatttatagattgaaagagaatattntaaaaa

SEQ ID NO: 2802 - DNA, 449 bp, Bos taurus
  Clone ID: 15-LIB3058-004-Q1-K1-D3
cattagacacctgagaaccctggaaaaagcgctggagaaaatggagaggcagaaggggcagcagcaagccgcacagatgcgacttatccaagaggtggaactcaaagctgccgctgctgatagagaaataaacttacttaggacttctcttcatcaggaaaaggaacaggtgcaacaacttcatgaactgcttgcattgaaagaaaaagaacacaggaaagacattgaaacaagggagttttttagtgaagctgagttccaggaagccttagctaaagaaattgctaaagaagagagaaagcatgagcaagttataaaagaatatcaagacaaaattgatgcattaaatcaacagtatatggatttagaaaatgaattccgtattgctttaactgttgaagccagaagatttaaagatgttaaagatggttttgaaaatgttgcaactg

SEQ ID NO: 2803 - DNA, 235 bp, Bos taurus
  Clone ID: 15-LIB3058-006-Q1-K1-D11
catctatggtaagagctctagctgaatcttttaaaaatactaaatatttttgagctccttggaggattcagaagaaatactacctgggtggtggtggggtgggggacgccctgtgtgcgggcaccgtgcttgtgtattcgagctgcatacatgaatacataccacagatgccatgtgaattccttagcaagattacatgatgtacctgaatcctagctgtctggtggccactatt

SEQ ID NO: 2804 - DNA, 118 bp, Bos taurus
  Clone ID: 15-LIB3058-006-Q1-K1-D3
tcccggtcgacccacagcgtccggcgagcggccgccctttttttttctttttttggtgtttattttttatataataggcttggcaggggttattcacactaatagtaaaaataatatt

SEQ ID NO: 2805 - DNA, 215 bp, Bos taurus
  Clone ID: 15-LIB3058-009-Q1-K1-D11
cgtacacaaagagttgaaaacacgctttttgttcaatatactcttatcccatatcagggctgtttatcctgcaccgtgggatcagtactatcatcagcaagctaattaagtatatatatattgcatgagagagcttgcacagcttaccatatatactccgttgactttttaattaccccacatagcacttcttatcttgaagccatgatcatctg

SEQ ID NO: 2806 - DNA, 422 bp, Bos taurus
  Clone ID: 15-LIB3058-009-Q1-K1-D3
gcgagcggccgacctttttttttttgttttttttattctttttttttttttgtaacaacggggaattatttcccaactggggtcttcataaacattcattataaatggccattaagaaggtacagttattcatgttaaaattaatccaagcttgcccaattccacaaggcatggacatttgaacactccctatgccaggcatactccttttctaatttaatcttcaaaatgacccggcaaaagtccataaactgaaaggttatgtatcactaattgacagagctggggatggaactcaagtcagtgactcgagacgtgagtaagttataggtttcagatgaatgcataaaatatctttatgaagacaaccatgagaaaaaaattactatggaatgtaactgagaactttttataaaagactt

SEQ ID NO: 2807 - DNA, 407 bp, Bos taurus
  Clone ID: 15-LIB3058-010-Q1-K1-D11
gggaaggcattgcatagactatttgaggtttatttccagtgcataatgttttgcataatagtagagataggctgagccatgatggtttagagatttttctgttcaaagaacatagactgcctcaaattcactagcatgtatatgcttctcctggttaaagaactgttggagggtataagaaaataaactttcatcccacaaagacatactagataacgtttctggccattactgaaaattgaactggaagctctgcatatccgccctgccataaagtagaatattctttcagttccagaggacagtgagaataaaaagactaattcacacatatcttgcttctgttagaagactttctgaatatgtcattaacttaggatatcagagcaagatatcaaaaattggag

SEQ ID NO: 2808 - DNA, 328 bp, Bos taurus
  Clone ID: 15-LIB3058-010-Q1-K1-D3
ccacgcgtccgatcatgtattgacattttaaaaattggtacttgagtcttaaagctgacgtattaactgtgctgagtgtaagaacccgtgttaagaacctgattttgtgattccacaacctggccttttctattgtgccaggccctattttgtgagtaaacatttccagccacagtgttaagtaggtgaaatttgattgtcggggcctgtgacaatggaaatgaaatgcataattaagagtatgggatgtttctctgggagagattttattactaaacacatttgctacgggaaaaaatctatacacatatgatatagaatgaaatgt

SEQ ID NO: 2809 - DNA, 61 bp, Bos taurus
  Clone ID: 15-LIB3058-013-Q1-K1-D3
ggggagaaccaaggcagaaactccacctatgcctgaaagttattaagaagttaatgaaata

SEQ ID NO: 2810 - DNA, 398 bp, Bos taurus
  Clone ID: 15-LIB3058-015-Q1-K1-D11
cagacgcgtaggcggagtgaaaggcctgtagaggaattgctgaaccacagatcgttaagatattgctaacacaatcgaatgatgatacagttctaccacacaagaagcacttcagacctaccatgtccttagaatttccagagtagccctggctcctagataaagatgggttcataaccttgaagaactgtcctaactaagcacttagcgctgatgctggccagccatgatttatgacttttccagccgtcatcgagggcgtggacgctgggagccgaggcaactagatgaagcagtcaggtgttgagttgccagtagcatgatgccacagctgtctagcatcttcaggtcctttagatttgggacatgttggcagcgtattttaaaaagctataact

SEQ ID NO: 2811 - DNA, 366 bp, Bos taurus
  Clone ID: 15-LIB3058-017-Q1-K1-D3
cggcaattggctgccatcttgtacttggggcacaatctcatatccggattttcccatggggttgctggaggatgggagatagttctcaggggatttagccttcctcctgatatccacccaataagaattcctattaatgtatgatctcttttaattaacaaaaataaccggtggcttactatatgtcaggctctgctgaatattccctatgtggtagttaatatgcgaggtaaatgagggtgatgaggtaaaatctaagacagtaccacttaggttcctgcatctgtgacagacttctcctctgtccaaccaggaaatttcatgatcttgcttattcctgtctcggaaaattctctccgatgtcta

SEQ ID NO: 2812 - DNA, 444 bp, Bos taurus
  Clone ID: 15-LIB3058-019-Q1-K1-D11
ccggccctgaattcccggaacgacccactcgaccgactctttcggtgacagaatgggctagggctcatttcaacttgccaccgcgtgggcaacaactatccgaatcatgtattaaatgtacatggccatgtaccctatctatcattgtgcgcctatcttgcagaagatgacgcactgtgaccaccttcactatggacaataactgggtgacgaatgtgaaacatagtagcgatgaacaatcaatgcctacagtaaggctgaactctaactgctgaagctcaagccacatgatatacattgtcaaatagggcttatgtaacatgcttagtactagtctagacagctggtgcatcttacattaatacacttaggatgctctccttttgtgcaaccaaatatggaccatggtatgaaggacattcgctaatgaacactaacttatga

SEQ ID NO: 2813 - DNA, 441 bp, Bos taurus
  Clone ID: 15-LIB3058-025-Q1-K1-D3
atgccctcaggtcttacaacttactcaaattgatgttactttatcctggactttaaatggtttttaacttgcagccccaagattcaaacatatttttttttccagagagctaattggaaccttttcctttttcctgcccttcaatgacagtttttaaatgtggaaattaccttctttgaggaatgctgatacgttaacatcaagagaaatgcaatgtcttatctactgtcataaaagaaagtttgccagttaattgagagaaaagagcccaatctggggttacttgaccttaccagttactctggccttcaggctctttttcactttgagagattattgtgatactgtggatggatacaagtaaatttaaaaagagtgtcaagttaccatactttatggatgttctttgaagggttaagtggaaacgcccttgtgagcttt

SEQ ID NO: 2814 - DNA, 395 bp, Bos taurus
  unsure (171),(213): unsure at all n locations; Clone ID: 15-LIB3058-029-Q1-K1-D11
tccgacccattcccggtcgaccagcgtccgcagtctaaacactcgagaggcagtaaacccgatatccggcgggtggcaggggttccgcccggagaggagctgcgggagttcggtcctgcagcatgaccaggcgcacatcctggccatgggtcccgtcattccacctatctnacggcctttcagcaagagaggaaagcagatgacactgagganctctggccgacgggagcagcaggaggctattgctcattcccgtatgtggaattcaccgggcgagatagcattacctgtctacgtgtcaggggacaggctacattccagagcaagttaatgagttggtggctttgatccctcacagcgatcagcggttgcgtcctcagagaacgaagcagtat

SEQ ID NO: 2815 - DNA, 440 bp, Bos taurus
  Clone ID: 15-LIB3058-029-Q1-K1-D3
cgccgccggtcgcgggctgcgcgtgtgccgcagccgccgcccagcctccgtcatggacctgtggggggacctgccggagcccgagcgctcgccgcggccggctgctggctctgggggacctttgctttttgacgatctcccgccagccagcagtggcgattcaggttctcttgacacttcgttatccgaggaggtaaagaatgaagggaaaggagcatagagaaaagcctctgatgaagagaagaatgggagtgaagagcttgtggaaaagaaacctcttcggtgatcttcagcctgaaaggctacgtggctgagcggaagggcgagcgggaagagatgcaggatgcccacgtcatcctgaacgacatcaccgcggagtgccagcccccgtacgctctcggcacccgggtttcatactatggctgttttgatggacatgg

SEQ ID NO: 2816 - DNA, 204 bp, Bos taurus
  Clone ID: 15-LIB3058-030-Q1-K1-D3
tccacgcgttcgcccacgcgtccggcgagcggccgcccttgttttttttttttattgtgttttggtttttgtttttttatttatttatttttaataaggctcaattagatggagaacgtgtataaaatgagtggcgcacataaaaatatggattggaccgcgtttttttgggttggactataacattgattggtccatttgggc

SEQ ID NO: 2817 - DNA, 425 bp, Bos taurus
  Clone ID: 15-LIB3058-034-Q1-K1-D11
gttgtagatcgcgagcgttcgccctttttttttttttctctgtagaaattcattttattggtagactattttcaaaagaagcagtggtgtgctgtttttctaaaaatatgcctttatagattcatatataatatgtatattataaaatccatacatgtatttacatggttgctacatacaaaattacagcactgtgtctgtacagcactgcgtctgtacatatctgtaggtacattctttccactcatccctgctgtgctttccccgtgagggaggaagatgatccttgtaaagcagcttgagggcggcctcagcccggtgcctctgagtcccgagtcagggcctcagcagagaaggtgaagcggttgctgaggatgagcaggagtgggaagttgctggggtgaccttccgtgggcctggtgggc

SEQ ID NO: 2818 - DNA, 425 bp, Bos taurus
  Clone ID: 15-LIB3058-035-Q1-K1-D11
cttgtctttatcgcagcggcagctcatttagttaggagcggggccggctccgggacgtggcagcactgaacggcctgtaccgtgtccgggtcccccggcggcctggggcccctgatggcccagaagccggtggctacgtctcctcctttgtccctgcgtgctccctggtagagtctcacctctcggaccagctgaccctgcacgtggacgtggccggcaacgtggtgggcgtgtcggtggtgacgtaccccgggggctgccggggccacgaggtggaggacgtggacctggagctgttcaacacctctgtgcagttgcagccaccagtcacagcacccgggcctgagacagcggctttcatcgagcgcctggagatggagcaggcccagaaagccaagaacccccaggagcagaagtccttcttc

SEQ ID NO: 2819 - DNA, 421 bp, Bos taurus
  Clone ID: 15-LIB3058-038-Q1-K1-D3
tcggtcagacagactaaattctccaaggtaattggtcaaagaaaatttttcaaagtgacaggcgtgtcatctttcattgcatttgtacaactggtcatttaaccttcacctgctcccagggtttgtactgtactgttgtacttataatctagcaacagaaacagaagaaccaccaccctgttcttacaaagatctgaagtcacaaggctaagaatagaaagttcccaaaacatgcaaaacatttccagctcatgaagaaaaatttagttttatgagtgtttatactaataactcagacaaaagcctagatgtcatttttcattcattttatatctcacatcatatactttcactacaaggtcattgctgtttaaaagatataattaagtatataagataatacatattatggtgagaacac

SEQ ID NO: 2820 - DNA, 427 bp, Bos taurus
  unsure (142): Clone ID: 15-LIB3058-043-Q1-K1-D3
cggtcatgctccggtcttggccaccattgatccactgtgaatgcagaagacctcctgaggtgaagaaattctcagaggactttggacaggagagttaaaagcttcttcatttgcctgatggtgaaggtgggaggttgattgnggtcaatccatggtactccccaggtcagtggccacacagagctccagggctcgtcccaaggccactgcagtgtccccctgctgaccggccgtcagtgggggagcaggaaggaagggccttcccgctgcggagtcacagaagcacattcggtacctggggggtactggctcttcctgcttactcctcctattctggatgcttaccatctccttgtcctgcccgcctcccatggttctttttttaaaccattctttggtccctaaattaatgctgcttggaattttg

SEQ ID NO: 2821 - DNA, 412 bp, Bos taurus
  Clone ID: 15-LIB3058-044-Q1-K1-D3
gttcttgatcgcgagcggccgcccttttttgagattttagcttgtctggcgtgctcggggaccgggtgtgtggttgagaccccacagatgagttagggaggtgcactttgtggttcaggtggggttttaacttagaggctggcttactgggcatgtgttatttgaggattccttccatcttcaggcacttaagctgtctcagcacctgtaccgtggtgcaaggtcctccttttgagagtgttttccaggaagctgtaggtaagggtgaccaggcagggcagattgtgttggcgggctccatgcgcaattaaaagacaacaaacagttcacgttgataacagatggagggcatttgggaatctttgattcccacttgagacttaacgtcttcctacccttccaacattaaaat

SEQ ID NO: 2822 - DNA, 423 bp, Bos taurus
  Clone ID: 15-LIB3058-045-Q1-K1-D11
ctgtccacagaccctcactgcacacccttagcctggtcaaggtggggagaagccggctgcctctggtctctctccacgggcttggctgcttggggccgcttcccgcctggagaagagcacagggcgcctgccccctcctcctgtgaacagcctcctaagtgccgcccgccccgcccctccccgctcctccagcccacgtgcggccgtctcccccaggaagggtgctgtcccgggggcttcagtggcagtgagcctcccgcctcgggtgtgccagcagggtcagggccaggcccagggctgtgcctccacccaggctctaacctgtgccttacttgccttctcccagctgctccacaggccagcagagggcctggggcagatgagggtcaccaaggaggaggccgaggttgagggtcccgcccg

SEQ ID NO: 2823 - DNA, 440 bp, Bos taurus
  Clone ID: 15-LIB3058-045-Q1-K1-D3
gtgcacacggccgtcgtgcctcagcttctgctcgtggcctccaggtcggatatctacgtgcacagcaactgcatcagcgaacgaggtctcatccggaggcagctccaagggggccagtgcccacaattctcctcagacacccccaagccgagatactccagtgtttccttcttccctgggggaaggtgaaattcagtccaaaaatctgtacaagattccactcagaaacctggtgggcagaagcatcgagcggcctctgaaatcgcccttagtctccaaggtcatcaccccacccacctccatcggcattggcatcgcggccattcctgtcactcactccttgtccctgtcccgcatggagatcaaagaaatagcaagcaggacccgcagggagctgctgggcctctctgatgacggtggatccaggtcagaaggagcac

SEQ ID NO: 2824 - DNA, 110 bp, Bos taurus
  Clone ID: 15-LIB3058-046-Q1-K1-D3
gtttagatcgcgagcggccgccctttttttttttttttaagttctttaaaaatttttttcctttattttatttttttaactttacaatattgtattggttttgccatata

SEQ ID NO: 2825 - DNA, 380 bp, Bos taurus
  Clone ID: 15-LIB3058-049-Q1-K1-D3
agctgttactttgagacacatggtttgagatctttatatcagatcaaaaaaagcagcttagtcatagcctttatatcatcaaatataaaaactggaccttccacacacatataaacaaacacaatgtttctgtttaacagctacttataagaataaaaaacaaagttctgaactttgcttctaaggaaatacaacagcagtcctatttttccatattttttcaaataggtaaaatttagcattttctatctatctctagtagacattaagattgattttacagcaaaactaaaagctggttctttgagaagataaataaaatagacaagccattagccaaactcaccaagaaaaaaaaaaaaaaggagaaaaatcaaatc

SEQ ID NO: 2826 - DNA, 394 bp, Bos taurus
  Clone ID: 15-LIB3058-051-Q1-K1-D11
tttgaagatggcaaaaagatggcatctttttgttgttgttgttagtaaatgaataaatatgaaagtttagtgtggtacacttcctccctgaaaagagtgttaagccttttaaaatcttgctgttcaaagcatgagtcctggcccaggcccatgactgccacctgggagcttgttagaaatgcagaatcttaccctcatctactgtctcaaaatctgcatttaaacaaggtccccctgacttggacacactttaaagtttgagaagtactgaactaaacaatctagaaaatctttagggtcttgcttaatgaagattctgtctggggcccaagcattacaatcaaacttagagcttttgcggaaaaggtcaaggaagcttgttatgaattatgcc

SEQ ID NO: 2827 - DNA, 439 bp, Bos taurus
  Clone ID: 15-LIB3058-051-Q1-K1-D3
atttatttgctcagggcgggcagcctgtggtaaggaggggtcagaggtgacaggcacacttttgtcgcgttcaccactggttttatttaaagtggtggctccgagtcctgggccttgacccctaaagactttttataacagatgttaagagcaggggaagccatccactggccgtggaccacaccccaggggaacacacggccctccagggacctgcacccccacctctccaggggacttgacaaaggtcctcgaggccgagggacattggtgccccttccccctcccccgactttgacttcgtggttctatgaaaaccatgttaacacttttcactcttataaccacagcagggcagttgcatccagcatgtccatgtcctgccctgggcagcttggcccgccgggcactttcgctctggtctgggcacccacccaga

SEQ ID NO: 2828 - DNA, 430 bp, Bos taurus
  Clone ID: 15-LIB3058-052-Q1-K1-D3
cggacgcgtgggcggacgcgtgggattgctacactattttaacataattctgagaattgaaaacagaactgccaaaaaagctaagccagtaataattatttctcttaaatgaacttaattttggtgctcaaatgttatacactgactccttcaaaatgtttaagaatgtacttcaggttgaatcttatattgaagacaatataaagtcttcatttaaacaaatatttaagctgaaagtgatagcaaataataaattatagcaaaacattcagatgtttgtaattaacaagccagaaggaaaatgcctaaatgtttttaaggcacagaaattccacttcagaacatctgttttataacttgttttaaaaataaaattaaaaagaatttgctattaaacctaaagatacaatgtatatctagtataatcaac

SEQ ID NO: 2829 - DNA, 390 bp, Bos taurus
  Clone ID: 15-LIB3058-053-Q1-K1-D11
gggaaactgaactaaaggagttagcatctttatttttgtatcaaagatgaagattattttgaaattattaagatttttacacaactctgaagtctgttgcttttgtaaacaagttgtttaatcttagggatcccccacaaccacctctaacctacttaacaaagtcaatgtgagtctaccaagctttgttctggatacaaacacctgattaaactcctgagcatggtgtaaaaatttttgtaaaaaatgcatcttagggttcttttccttcccttcactgtcattaatgttaaaaagattagccactgtcttgttgaactaaatagcttaactttagaaataagaaagagcacacttagattaacaggtgagcagggctttggagccagc

SEQ ID NO: 2830 - DNA, 433 bp, Bos taurus
  unsure (1): Clone ID: 15-LIB3058-053-Q1-K1-D3
ntccgtttaaatatatacaatttgtctcctctttgaaagctgacatcttaggctgttttattagtcttaaatgatgcatttcctttggtcattttatactaatttcttccatagtaaattaatcaggctacataagataatatttcccctgaagggtaattttagtgggacaagggtggtgggatgatgtgatatcagatataggatttcatcagaagggttctgtaaagcctaaactcccttttaaaagtgcctagtgatagaggcgtggtttgtcatctattataattggaatgtcattgtagttgagtgaagtttgatgtaaataaaatatccttttaaaaatgtcaagataccagaataaacaaacaaaataaacaacccttaagatgacagattttcctcagtgtgcaggtatcccttcttatatacc

SEQ ID NO: 2831 - DNA, 270 bp, Bos taurus
  Clone ID: 15-LIB3058-054-Q1-K1-D3
ctttcaatgccactgtaacaaaagaccttggatttttgactggaggatctgaaatcaacggaagcaatgactaaatcaagtatgtcattttcaaaataacaagctcagatgataggctcagtcattcttaatgaagagcattccctatttgataaaaataactgatactgcatttccatcgtaactttaaagccgtttcattagtcatgtacaacaaagttgactgtacaagcattcctctggatggtatctgagagcctgactaaaggt

SEQ ID NO: 2832 - DNA, 321 bp, Bos taurus
  Clone ID: 15-LIB3058-058-Q1-K1-D3
ggcactggagaggaacagcctggcgaatgttttgctttaatggagtaccaatggcctcaaaaggccagtgtgttcgctgtccgacggtcatgggaagcgacgtgccctacaaactaacgctatgactcaataggactgatcgacgggataattagttcacattccacggagtccacggatttgaagggactgagctatttttggtcaaccttggggtaaatggaaatttcatctgaaccagagccagcattcacgattgataagaaagggtcttcgatttaaaacatccagttttacgttaccatggatgctaccccatag

SEQ ID NO: 2833 - DNA, 427 bp, Bos taurus
  Clone ID: 16-LIB3058-003-Q1-K1-D11
cggacgcgtgggttctcctggtagctgacaatggaaactatcactggctactgccacgaggcctgatcctggtttccctcacccctggaagagggttaagggaggttgtctacctagttatactctgcgggactaggtcgctgtagctcacctgaaggctgttgacggtgttattgggtccccatctccagccctgctggacattccctttctgcttggaggtcctgtgtttcagaacaagagtggttgctggtgaccagctctgagcctgttcctgcctgcttgtcatgggcaatttccgcacgtgtctttggtacgttcctcccaaaggtgtccccaaggtgtgcaaaggaaaactgacaatccgcggaggaaatctattactgtggtgggggagagacgctaggagtggccaagcccctcggtt

SEQ ID NO: 2834 - DNA, 313 bp, Bos taurus
  Clone ID: 16-LIB3058-005-Q1-K1-D11
ggcatctctgcaggactgaccctgcccgcaaccgcgcaccacccgccctagaagtgggaagccacggcccgaaccggctcctcccacgtgagaccggactcggaggaaggcgtccaacccggtccaaagatgctatgggaacggatctacacggacactgtcgcacaaagcacttacagaacgggagaaaccttggtcattgcctttttcacctatgggtaaaggggaaaactctcaggggcctgttaagataaagatttatataacctttgtaaccttatataacctttgtaatttatataaccttcaccac

SEQ ID NO: 2835 - DNA, 139 bp, Bos taurus
  Clone ID: 16-LIB3058-005-Q1-K1-D7
gcgagcggccgcccttttttttattttttatttttttacattttatatactttttggtggtatcagagacacagtaaaaacgcataaacaggaagaaggaggaccacgagcgcgaggacaacacaggaaagaaccaaca

SEQ ID NO: 2836 - DNA, 345 bp, Bos taurus
  Clone ID: 16-LIB3058-008-Q1-K1-D11
accagacaccacccatgattggagaagaagcaatgattaattatgaaaattttttaaaggttggtgaaaaagctggaccaaagtgcaagcaatttttcacagcaaaagtctttgctaaactccttcatacagattcttatggaagaatttccatcatgcagttctttaattatgtcatgagaaaagtttggcttcatcaaacaagaataggactcagtttatatgatgttgctggacaaggatatcttcgggaatctgatttagaaaactacatattggaacttatccctactttgccacagttagatgggctggaaaaatctttttactccttttatgtttgta

SEQ ID NO: 2837 - DNA, 425 bp, Bos taurus
  Clone ID: 16-LIB3058-010-Q1-K1-D7
cgaaaagatatgttatgctattaatttgggaaaagaaatcattgaggttcagaaggatccagaagcactggctcaattaatgctgtccgtaccactaaccaatgatggaaaatatgtactattaaacgatcaaccagatgacaatgatggaagtccaagtgaaaatagaggcgcagaatctgaagcataacttccttgcgcctctgggtgaagagcacccaggaaggagagctacctccttaagggttttcaacctctctgatacatacaggcacaccacctggtttcagaatgctgacaatcgcttgtggaatgtactcttgatgccttgatactgagacttgggagggaaacagtaagaaatggttgacaacatacccatctacaaatgttattttaggtgctttgtggtaagtccttctctt

SEQ ID NO: 2838 - DNA, 294 bp, Bos taurus
  Clone ID: 16-LIB3058-011-Q1-K1-D11
gttcttgtgagtctgtatacactaaaattaaaaaaaaaaaaaaaaatggactccttattggactctgatgtagtgcatcttcctctctcaagtccacagtattgcttaatcaatcctctcatttactagataggaaggggagcctgtgaacatacagcgacttggctgagttggcagaactccaacctagacattcttctcacaaaaagctactacactactaatatcgccattactgaaaattgaactggaagctctgcatatccgccctgccataaagtacaatattctttc

SEQ ID NO: 2839 - DNA, 402 bp, Bos taurus
  Clone ID: 16-LIB3058-013-Q1-K1-D7
cggacgcgtggggtacaacgccacgcagaggcggccccgcgtgctgtcctgcctgcactccgtgtgtgagcagtgcctgcagattctctacgagtcctgccccaagtacaagttcatctcttgtcccacctgccgccgtgagactgtgctcttcactgactacggcctggctgcgctggctatcaacacgtccatcctgagccgcctgccacccgaggcgctgaccgccccgtcgggtggccagtggggtggcgagcccgagggcagctgctaccagaccttccggcagtactgcggggctgcgtgcacgtgccacgcgcggaacccgctgtctgcctgctccatcatgtagcgcccgccccgccgtctctgctccctgctgcttcaaggatctggccctgc

SEQ ID NO: 2840 - DNA, 298 bp, Bos taurus
  Clone ID: 16-LIB3058-014-Q1-K1-D11
gacggcacgcatccaggcgtaaaagagtaaaggtcaattgtctttctaatttagagagcaagaatatcaataaaagggtgacatttatattatctgtatttactatcgatgtctattccaaatgaagccttggctcatatgaataaaagtaaatcattttggcagaatgtacctttctcctaaagtaagagagaggaaggagcattaagagaggtaaggtggaaatgagtcagagcagagcataacttctataatatggttattactgcagattgtgaataactataatcttttcatt

SEQ ID NO: 2841 - DNA, 55 bp, Bos taurus
  Clone ID: 16-LIB3058-014-Q1-K1-D7
gttctagatcgcgagcggccgcactctttattacactaggactatttagcccaaa

SEQ ID NO: 2842 - DNA, 103 bp, Bos taurus
  Clone ID: 16-LIB3058-018-Q1-K1-D7
gatgaacgtggtgtacatgcagattgttagaatatatatctacatatgtggatacaagggattatgactcataatggccactttataaaaccttcatactaag

SEQ ID NO: 2843 - DNA, 427 bp, Bos taurus
  Clone ID: 16-LIB3058-020-Q1-K1-D11
cttatattataggcatagagatacaagcaagtaactaccgtgttgtgaaaaagtaaccaaaatcatgtactaaatgcacagctttatttaccctgtctaccatcgtgtgcctctcttccatttgctttcttcctgtttttccttcccctagggaaaaaattggtttcacgtttgtaaaaagtaatttcagtagctaatcatctaggagagtagcctgaactctaactgttgaaacttaaccaaaataagatactttctcagttagggcttatttattatgtttagtagtagtaaggatagtaggtttctcttacattaattgaaaatggaggctataaaaatgaagatttttctttgaattatggtatggggaagatttgttattaaaaacttcctttgcacaaaataacccacttggtatctgaaa

SEQ ID NO: 2844 - DNA, 116 bp, Bos taurus
  Clone ID: 16-LIB3058-022-Q1-K1-D11
tcggccaaaaagaggttaatttggttcccagcatagctctgggccaaaaagaggttaatttggtttataatgttaaaagagagcgagaaggtgggttaataaaaatttgggtgcct

SEQ ID NO: 2845 - DNA, 413 bp, Bos taurus
  Clone ID: 16-LIB3058-023-Q1-K1-D7
cagacttttgagggaaagaaattgactggttatacatctggatacgtgactatgttcaggcctttagtttaaagaatatgtatatagctatttacaatataggacacagtaacttgctaatttcatttgtaaagtataaatctctaggatacctatgaaagacactaaataatactcttaagatcaaaccaatcttatgaagcaatattacacagagtaatatatatgctgcactgtaagaaaacaagaactcatatctctaatattatcacagtagtaaggcttactctcttatgagttgccgcagcctatcgtataatgacaaattcgcaaactgtagaaatagtccaagtttttgtgactgatacaaagttgttgcccccaaaattaatttctattgcactgcccggtac

SEQ ID NO: 2846 - DNA, 443 bp, Bos taurus
  Clone ID: 16-LIB3058-029-Q1-K1-D7
gttctagatcgcgagcggccgcccttttttttttttatttttttttttgcatgcaggggaagctttattaaggcatagaactattataattttttttaaacagggatgtagaatactcaaacattttaaatgacctatgaaacaactggcatatatttagtaagcaagatccactttaacaattctctctgctcccaccctcaatgctcaactataggacattcatttatttatcatgtttagtatttctgtctcacagccatctgtcagaccttttgctgcaaaaacgtgttttttaacaattaaatacacaatggggagatatggttagacatttacaggacttgaaatgttgaagaataatacacaataataggatcacaagtagggcagtggaatctttcaattcattttgcttatttcagtgtattttttaaacatta

SEQ ID NO: 2847 - DNA, 261 bp, Bos taurus
  Clone ID: 16-LIB3058-031-Q1-K1-D7
ctctgtgccacccatgtgctgtgccagtcagctggacggaaaatggcctcacttagtgtgcgttctagtcagggagacaagaagtaagggagcaaaattgaaactgacaagatcacttcagagaacatgaagtcccccatgaagaaaatatgactggaagatatgacagtaactggggccgggtcagggaggggccctcgagctgaggacaaatgtggacagaagcctgaatggttagcagcccgtgtgggaccctgtttt

SEQ ID NO: 2848 - DNA, 403 bp, Bos taurus
  Clone ID: 16-LIB3058-037-Q1-K1-D7
aagtaacagcttaaattcctgtcaccttttttggtgccgtgtgttcttgctcacggtgtgctgataatgtggattcattccatgtggtgggtcctgccacatcagggtcggtcacctgcgctggcttgtgggtgtgactgatagcagcccttacctgttggaaccttccctgcaagcctatttgaactaaaatagaactgcaaaagtggttcgtttagcagcaaaacatcagcctatcactttgttttggatgatccctggcagtttgaaagctggctgggagaaagatggtttgtgaaaccagtcttgtagaggttgaaaatcttacctaagatttgggcagaaagcttaaatacataggctggcaatcaaacaccaggtctgtgtgacccctttcatagct

SEQ ID NO: 2849 - DNA, 363 bp, Bos taurus
  Clone ID: 16-LIB3058-038-Q1-K1-D11
gattcccggccgcccactcgtccggtgtagatcgcgagcggccaccctttttataacaaatgccatatagttccactgcggatatactttttatctgatccgtactatgctgagctgatagctgcatgcactcattgtgaccaaagtacattatatctattcctaaagttctttgagcgtggagcaaattcaacacaaatgcacttatagatccataatacacaaagataacatcctgtgagatacagactaaaactttacaagactataaactcgaatctacaaaatgaaagcgtaactgctactctatactatcctctgatatactcggtagacttacgtccaagtacttaacagtgcttt

SEQ ID NO: 2850 - DNA, 436 bp, Bos taurus
  Clone ID: 16-LIB3058-039-Q1-K1-D11
ggaacactgagtgttcctcttttttcataagaaatgtgaagcttaggagatcctctgagggcacaaagcatgttaattttcagtgtctactccagagactggggtgaaaggatgtaagtttgaacaggcacattttttttttccttgaaaatgtggcttcttcaacttgtgtcatattcaggatggaaaccttactgaaagaaatctagcctttaggtagaattacctttgaagattcttgtgtgtatccagaatgaaagataagagtaattgtttccctcacattcacaatccccattgatctaaagtcatgtaatgtagagcatctatagcacattgggtttaatgaatgaaaaaaagataaaaaatttcaactaatttgggggttgtttcttacatatggtactaggaaatgccttgttggcaaagcacattt

SEQ ID NO: 2851 - DNA, 439 bp, Bos taurus
  Clone ID: 16-LIB3058-039-Q1-K1-D7
gacccacgcgtccgcggacgcgtgggctggacatccatcacttttgactgggaagtgcaaggagaggcttggcccacagggaggctggctgagccaatgtggggggtgggtaaggacagtgccaacccctccttgcccctctgcaccccagggaagccctgcccagggactttaggccaccctccgactgtgctgggctgttcagagtgtcagtgtgggggttggtccacatggggccaccctgcttaccgttcttgggtctagggggttaaaggctaagcgccctcttcctacacctcacatctatacgtctcactgcggcatcgcatttctgtcccagggatcctggcttcttccaaatggactctgtaatcagcactgtgttattccagttacagtcactgtagtcgtaagaaatgtcagtagccatttgttgggc

SEQ ID NO: 2852 - DNA, 427 bp, Bos taurus
  Clone ID: 16-LIB3058-041-Q1-K1-D7
gccgcaagtgcccagtccgctttcgggttccccacaaatgtcagcggccccgcaggctgacacggtcttcccgggcccaccgccagcctgacgccctcgagtccccaagcactcagtgagtccacgcagggccgcaccatccaggcgccaacgccgacgccccggactgtggatgacacggcacagaggcccacacccaccctcttaaacacaaccccggagcccgcctccccaactgtggcttccatgtccacgaccatgggcattacaaccaaggcccctgagccgaccgtcagcacagcggcagcctccacagctcacaccagcccggcccccacggtggaggccacgacccccacgacacggcccagccctgccacatccacgccgggggccgcagggccaggcacgactcagacgccggagc

SEQ ID NO: 2853 - DNA, 425 bp, Bos taurus
  Clone ID: 16-LIB3058-044-Q1-K1-D11
gatctttccaacccaggaattaaaccggtttctcctgcattgcaggcagatttaaagggaagggatacactggaaacagtgacattctctgagaagccaaaggttttgtttaatcaaatagctttcccaacacttgacaataagtaattctcacctctttgggggttatgatgactttgaggatctgataaaagttctgtatttggatcctttctccaaaagaaaaaaaaatccaccttcaacacacacacacacacacacagtcgcacaatttcagggcatttgggttgcccctcccttccctcacccccatttggtgctcatgcaccccacgggaagaatcttggccatcaaggacctgcctctgggtgaggggagggcattcaccctctcgctgcttgtatcctgctgaccgctgcctttcg

SEQ ID NO: 2854 - DNA, 412 bp, Bos taurus
  Clone ID: 16-LIB3058-044-Q1-K1-D7
gcgctgtgctcatcgttttactttgaggattaaagctgcgctggcgtgcgcggagaccgtggctgtggttgagaccccacagatgagtgtagggaggtgcactttgtggttcaggtggggttttaacttagaggctggcttactgggcatgtgttatttgaggattccttccatcttcaggcacttaagctgtctcagcacctgtaccgtggtgcagggtcctccttttgagagtgttttccaagaagctgtaggtaagggtgaccaggcagggcagattgtgttggcgggctccatgcgcaattaaaagacaacaaacagttgacgttgataacagatggagggcatttgggaatctttgattcccacttgagacttaacgtcttcctacccttccaacattaaaattcag

SEQ ID NO: 2855 - DNA, 294 bp, Bos taurus
  Clone ID: 16-LIB3058-046-Q1-K1-D7
ctccctttcaataaaggggccagtctttactggcaatggctggtatttggctgtcagcctggggaggcagctctgctagcagctgggttcactcccacttcatcctggctgaaggcagtgctgagctctgaaatgtagctgacgaatgaatacccagtctgattacccagatttgggcagaccagcagtgctcgccagaattatctggcctgttctgggggatccaggtggtgttacatgtccatttcatgctttggggtcttctagccccacaaaacacttttagcatagcct

SEQ ID NO: 2856 - DNA, 431 bp, Bos taurus
  Clone ID: 16-LIB3058-048-Q1-K1-D11
ggtaaatggtcaccactaagtcattatatattactgaaatatccctagctgttatcatggtgcagttttttaagaaaagtttgcgctgttgaaattacataatgatctgacataatagacgttgagtcctaatcaattggtacaatttcacaaatcaaaccacacactgtggtattctttgcagagttagtttgtttatctaacaagtctaaacctttatttttacttctaattctttctggtgcttctcttttcactggaaatgcattgaatgggaattgtttattccgttgaagtgacctcttgtgcttcaggtgcagattgatgctgggaggaaaaaaaaaaaaaacaggacaaaacacagtttgccacaccaatgtctgcattaaaggctgtcagactataggaagttacgtaggtttcctccggtc

SEQ ID NO: 2857 - DNA, 313 bp, Bos taurus
  Clone ID: 16-LIB3058-048-Q1-K1-D7
cggacgcgtgggcggacgcgtgggtgatagagttgtgcttggataaactaatgacgaagtttttgagcagcgttagtgggaagtacttcctttccccactgatatgctctgtcacttctgttgagtgtcagtttatacagaggtctgtctgtctgtccttgaaccactaccaccctttcttaatgacatgacatggtatgaaaatagccttggatagttggaaagaaattgccctcccatatggccattttcaaaaagtgtcttgggctaaacttatctttatatataatcttagaactggcatgagaccttt

SEQ ID NO: 2858 - DNA, 341 bp, Bos taurus
  Clone ID: 16-LIB3058-050-Q1-K1-D11
gttctagatcgcgagcggccgcccttttttttttttcctttttttttttttaacattagggtttttttttatttttttccggacttaatgctatacaaaaaaatgccatattcaaccaggttaccttcaaaaaggtacattttatctcgcaacattttttaacaaaacactttataaaaatcttttaaaatagctatcactgacaacattaatctcacacataaacccaaagatcggcgtcccttaaaacctctcttacagaaagcttttttatgatctgcaaaccaaaccctttcaaattaactggaaaaaaaactacatgaacttttgctacaataacc

SEQ ID NO: 2859 - DNA, 157 bp, Bos taurus
  Clone ID: 16-LIB3058-051-Q1-K1-D7
tcgattatatgctcatggcgggctgcctgttttaattaggggtcagaggtgacaggcacacgttttgtcgcgttcaccacttggttttaattaaagtgtgttgctccagttctgggccttgatccctaaagacatttttattacagatgttaagagc

SEQ ID NO: 2860 - DNA, 191 bp, Bos taurus
  Clone ID: 16-LIB3058-052-Q1-K1-D7
ggcgaatccaggctggatgcttcctgttgggcggccccgtcaggctgccttggtgtcagaacacctgggtggtggggactggggtgaactggggtagatacactgaaaccagagggggaggttgtccctcacccaagtcaactgtagcctgtgggatgtgggcccagtggggccagatctttgcatttttc

SEQ ID NO: 2861 - DNA, 418 bp, Bos taurus
  Clone ID: 16-LIB3058-054-Q1-K1-D7
gggaagcgaagtcacgaaggctcagtctacctcatgcccggctcctccggggccagcctcacggtgaagctcagaagggtgcagagctgggcaggaggcacgggcccagcctcccagggacaggaggatggacaggcgcctcccagcagaacttcagggaccacgccccccgcagggaggtcacaggctgctggaagagccatggcccggcagcttggcaccctcaggggcccccagggctctgagccatctctgaacaaggcaggtctttttggtgctttcagccactttctttcctgcccgacgtggactcaacagtgaaaactggctgatggtgggcagagttgaggtgcagggccaggacaggtgtaaccggaccctgggccactccatgtggaatgaggtgtgtgcaggggtg

SEQ ID NO: 2862 - DNA, 442 bp, Bos taurus
  Clone ID: 16-LIB3058-056-Q1-K1-D11
gataatcagaacactgcaggtttacagttatagaaactctagcacaagcagctttcactttgaggtctgtggcgcagctgtccattggagtaatggctggtagtttattctttttttccccacccctttattaaatatttttataaagtacgtaactggttatttttacttaaatattttggggtggtgtgaacagggaagagggtgggggagaaactttttttttctaagattttccacagattctatagtactattgacaatctgagttagagaaggattgtactgctacgctgtttggcaccaacaccttcagggattggagcagcttttttccttggaagagtattcccagtgaagctgaaatgtacagcccagtgcagctttggttcatattcagtcatctcaggagaacttcagaagagcttgactaggccaaatg

SEQ ID NO: 2863 - DNA, 119 bp, Bos taurus
  Clone ID: 16-LIB3058-057-Q1-K1-D7
tcggtatgtgtataccaaaggtgcgcttttctttataccttgtatagagaagagaaacagggtgcatacagcatctttttactaccttatccctgataacagtctaccattacaaccct

SEQ ID NO: 2864 - DNA, 385 bp, Bos taurus
  Clone ID: 16-LIB3058-058-Q1-K1-D7
gtacaaggtctagatgccaagctggcctctgcccatccctcgcctggaccatgacttgggaagggactcagctgaaggactctggccgggggcagggacgggctttgtctcgcgtgtcgtctcccgagtgtgtgtgttggtgtggcgtacgtgcaggcgtgtgcttctggtcggggtttgagtttttcatgtctccttgccggacttgccctggtcccgctggagcggagctgatggcccccaggcgccagggctgcaggctgctgtgccattaaagctgccgccgtctgaggacgctctgctctctgcgcaggcgccaggccccggcggccatccccccgcctgccttccttgcccccgctgcgggcggcaccaggcctggggc

SEQ ID NO: 2865 - DNA, 330 bp, Bos taurus
  Clone ID: 17-LIB3058-001-Q1-K1-E1
tcggaagtgatctcaaccattgtcctgtgttttcaccaccaatggatcagatcagagggcaggcggtatggtctgcaggaaaatgtgacgctctgcctggttctctaagtaaagtatcattggtgcaaaatctcacctgctcatttacttactgactgtgactgatctactgcttcaaggacatacgtgcataattgtgaacagagctggtatagtccagaaaatctcaaatatttactctctacctctgaagaaaaatgtagcttgatcagagtctgtgtgagagatttaattcaattgatcttcttggattccaagaatactctgttt

SEQ ID NO: 2866 - DNA, 176 bp, Bos taurus
  Clone ID: 17-LIB3058-004-Q1-K1-E1
gttctagatcgcgagcggccgccctttttttttttttttcttatcctctcatcattgaggctatgtattaatagacattatggacaacccactcaaaaaatctctaattaaaaggtgaataaagagccactgtttctaaattacattgactataccacacaaagatcctacggtcg

SEQ ID NO: 2867 - DNA, 405 bp, Bos taurus
  Clone ID: 17-LIB3058-007-Q1-K1-E1
gtgcttcaggtgggaggaggcagggagggcccctggaggttgacccgagagtgctgcttctccggccttttctgctccagcagtgggccctctgttcgtccctgcacccctgagtccagccggcctctgcaccccttggccacgtgagttatcttgtggcccaggctcaccacgtgaggctccgcagcccctccaggctctctggggtttggtccttggccagttcctcctcatccctctgtggctgacccagcccgtgaccactcctgggtcctgcaccacctggaatgaatgatagtgatgaatgaatggtctctccccagggctggccctggccttcctccctgggcttctctgcaagcatgacggaaaggggtctggaggtcctgggggagtgaaccgggg

SEQ ID NO: 2868 - DNA, 413 bp, Bos taurus
  Clone ID: 17-LIB3058-010-Q1-K1-E9
gtcccctccaacctcaggtgacccgctgatgaggattgtcacgttcaagctaccagtgtgcaaccaactctccataaatgcctttgtgagctgaaaagagatggacacagtcaagcaaagacaggcctctggctttccagggaaagcggcaaacagcccaccctaggcaaacctcctggaagcctgctctcctcactgcttttgcgcacctgtcccagatgtcactgtcactgtggagcctgggctgggatccgacttcctcaccaggctgttgtagtatttggatttgcattccagcccttgggaaggggtcctgagggcaaccactgaggagtgaatgggggaaggggcttacttcctgtttccattatgccacagaccctacacctggttctgaagagccactctgaccc

SEQ ID NO: 2869 - DNA, 115 bp, Bos taurus
  Clone ID: 17-LIB3058-011-Q1-K1-E1
cgttgaatcatgtggtacacattttttgaaggttttttatttagcattcgtagtcacttttggtgcatatgtttttcagactttctttaataaaatgtttattttttagtgtatt

SEQ ID NO: 2870 - DNA, 136 bp, Bos taurus
  Clone ID: 17-LIB3058-012-Q1-K1-E1
cttgaccttcaggaatgtaaacctgttttgggtacagaaaacttaaaactttttgggggtcaaacttataaggatgtctaagtctcttgagctattatgaagtgttttgacttaccttgacttataatcaccagta

SEQ ID NO: 2871 - DNA, 429 bp, Bos taurus
  unsure (382): Clone ID: 17-LIB3058-013-Q1-K1-E9
caaaaaaagagtaaaggtcaattgtcttgctaattaagagagcaagaaaatcaataaaatgatgacatttatattatctttatttactagcgatgtctattccaaatgaagccttggctcatatgaataaaagtaaatcattttggcagaatgtacctttctcctaaagtaagagagaggaaggagcagggagagagggaaggtgggaaggaggcagggaagagcataacttctagaagatggttgcaactgcagattgtgaataactataaacttttcattaagaagttccttaaatcaattaaaacaatttaactcaatcccatacttggaaaccgcatttgactcaatccaacaagattaaagaaagaacattcagctntttgtcatttatagtacattcacaaattaatatgcatccctaacttg

SEQ ID NO: 2872 - DNA, 213 bp, Bos taurus
  Clone ID: 17-LIB3058-014-Q1-K1-E1
ttcggatgaggagccaagacatgtctctttcctctgactccccagttctcatcagggggccttagtatggccggatccctcttgcgttctaggcctgcatacctgctcagttctgggacctgacttgaggtcccacagcccatcacttccatgtcccatctagggatggaatgggtacttacttttcatgctgttgtgtcatgtcacttggta

SEQ ID NO: 2873 - DNA, 372 bp, Bos taurus
  Clone ID: 17-LIB3058-015-Q1-K1-E9
acaagttagatgaatgtgtacgtctaaacaaggattgctctgtgtcctcacagacgaatgaggtcatgctgggaattccctccgcagggatctggcatgactgacatgcagttctataaatgcacgtttgtctcatcttttttgtatcgtctgtgaaagtgttaatatagttttaataagtaaatatttttaggttacaaagctgacttctcatctttataaaattaaaactcaaaaagctgcaaatttgaaggaaaataaaagactgtatattgattactattagtgtcaccttttttcaacttatgaaatattgttcgttgttggggtttttggttctcatttattaataaatcactgtgcttatttcag

SEQ ID NO: 2874 - DNA, 126 bp, Bos taurus
  Clone ID: 17-LIB3058-016-Q1-K1-E1
gttcagatcgcgagcggccgaccttttttatactttattcttaaggtatgccgtgctggtattcacttggtctgacagccgtaacttgattatacaagtagtcctggatcttgacatagctgaccc

SEQ ID NO: 2875 - DNA, 418 bp, Bos taurus
  Clone ID: 17-LIB3058-019-Q1-K1-E9
gctcctctaccttgagtgtcattagttgtctagtctgggggagaggaagtgtctccgtgcggccggcggtgtggcacccaggtgcagcgggtcagcgctcccttctcccagccacagtgctgagttggaagaaacaagcattgtaccccaggatcgtttggttggctccagtcaaaaccttaattgtcaggttggatgttctgtactcagcaggagacagaacgttccatgacagccaggtgtcctctggaccgtctcaagtgacgcagcctgccgatcctgtcagtgacccacctgcatggaacagtgtaaggtggactcccaagaagaggcggttgtctgtcttgtcttgtcttgatgctggatcctgaactagcctagacctgctgcctctctcttaagacttggctttcctttc

SEQ ID NO: 2876 - DNA, 319 bp, Bos taurus
  Clone ID: 17-LIB3058-020-Q1-K1-E1
gcggccgcccgcgatctagaactctgaatcgcttaagaattctcagtctctatgggatttagggaagcattataaatgcattaatccttatagtcaattctgtgcctaggattttgcaagggaacagttcactgaactaggaaaagcactacattttaaattcagcattagtgcattgggaaggaactttactgctttgtgcttggcatgtcattattttccatttgacattagggcctttccaaaatgaatgtgaggaattgctttcacttcaagactttccttcttttcagtaaaactctaggaggtattatagggg

SEQ ID NO: 2877 - DNA, 444 bp, Bos taurus
  Clone ID: 17-LIB3058-021-Q1-K1-E1
cggacgcgtgggctttgtagaataggctgtttccatgtacttctgtttgcttcggaattcagtggacttcaaagacaagccccacaatgacgtcacatgactcacctgtaattctggactgtggcattccaaagtccctggggaaaaaaacaaatgcagagacttgaagttgcttttttcgacctttaacacttcaaggaattggtccagggtaactttttatattgtagggagaagtttttgccttggttgattgtgaatgtcacattaaaatgctttcttttctttcttcctgattgataacaactttccacaaagcctttccaagtagagaggatttttttcttccagaggaatttcacaggagtgaaattgtgtaccatttcactggtggggtgtgtaccattagctgaggagactagatccaggaagctgtcccgagag

SEQ ID NO: 2878 - DNA, 243 bp, Bos taurus
  Clone ID: 17-LIB3058-023-Q1-K1-E9
gcgagttatagcttagagtatgcattatactttaggagaacaagctcaatgtatataagtaatggtgatgaatggacgatactgctggttgatgggcctttgtacttgcttgagttcaatatttgcatgcatcttttttattatgaatgaaaatagtgagttagtatcttgttattcacaggaatagattgagaataaaatttctttgtgtagaatacaaacatgaaatataatcatgaataa

SEQ ID NO: 2879 - DNA, 426 bp, Bos taurus
  Clone ID: 17-LIB3058-024-Q1-K1-E1
tcgtcccgttcccattctagaagcagttccgccagctcatatctggatggggcgctcgtcgatgttttctacaccattctgtgttgttcatgagggcatcaaataatttcatttagccagagtttgagactcactgaattttactggcatagataaagagaggatgcctgtgggttatagagacacagcaagtccagggcctaacccgaaaaataacaagcctggaggaagtcacttctcaccctctcgttctgaggttcctgttgctccttcctgttgatggaggaggatgaggggctggaggtgagaggccctggacccttggggagtccttacccccctatactcccccagtgaacttgctaaagacaaggggggcccggccgtgctctgagtgctgagggagcccagtgccttgcacgaccc

SEQ ID NO: 2880 - DNA, 342 bp, Bos taurus
  Clone ID: 17-LIB3058-025-Q1-K1-E1
aagagagaagacatttaggatggcgcttctacaggtaacatagcaggggaatacactgggggttagaaatgtcaatcaaactaactttgccataaagattgccaagactgttttaaaaaaaatatttatctatttataggcctatattgggtctatgtcagtgcatggactttagtatgcatgaggtgaggaggtgctacattcaatttgaaatgcccaagcctttaactggagtggttaatctagttggggactggacggactagggcacacacgctttagcagcggcaacacataggcacagagatcatggatacccagggcttacctgggagctcaaat

SEQ ID NO: 2881 - DNA, 337 bp, Bos taurus
  Clone ID: 17-LIB3058-027-Q1-K1-E1
gggttcacttctactctttcgaagactgaagcttgaatgtgaaagaggccttacccatcatgctgactctgccctttgtctgaacttcaggccagaactttggtttcagtgtgtaatggaattgcttatttgaacaaatcattgactaacactttagaagaacaaataactaattcagatgtgacttaccccttcagttttataagaaatgaatggtgatcaaaatagctcaagatgaaatgactgtttcattggttcctaaacttttttttttttttttttggatcatagggactttttgagaattaaagccacagttgatctttgaagaaaaatg

SEQ ID NO: 2882 - DNA, 421 bp, Bos taurus
  Clone ID: 17-LIB3058-029-Q1-K1-E1
gttctagatcgcgagcggccgcccttttttttttttttttttttttttgcgtgcaggggaagctttattaagtcatagaactattataattttttttaaacagggatgtagaatactcaaacattttaaatgacctatgaaacaactggcatatatttagtaagcaagatccactttaacaattctctctgctcccaccctcaatgctcaactataggacattcatttatttatcatgtttagtatttctgtctcacagccatctgtcagaccttttgctgcaaaaacgtgttttttaacaattaaatacacaatggggagatatggttagacatttacaggacttgaaatgtttaagaataatacacaatattaggatcacatgaagggcaatgtgtatttttcaattcattttgctatt

SEQ ID NO: 2883 - DNA, 387 bp, Bos taurus
  Clone ID: 17-LIB3058-030-Q1-K1-E1
gcggggggaatccgtttctcccgtaggtgtgtccctagaccaaccggggctagtcagtgtccgaagaaaagggaagtgggaatcctatcgtgtaaaatatggaagttaaagccctaaggtgcattttcccctaggggatctcctgtctgactgaccggtgtgttcaagtacctggctttggttgggggaaaaagaaaagtccgtatatgcaaatcaacatatccgaacataccggaattgcttttccactgcactttggaaggagatattatggcctaactttgccgaaccattgaaggtttgtgcctaaaaatgttaagttgggctgaatgccagttagtctccatttagctactaggtgtgcatcctaagaatcctttttgaact

SEQ ID NO: 2884 - DNA, 416 bp, Bos taurus
  unsure (195),(401): unsure at all n locations; Clone ID: 17-LIB3058-035-Q1-K1-E9
gccgcgctgacggcggagaactttgcagctcttcagagcctgctgaaggcctcctcggaagatgttgtcagacagctgtgccaagagagcttttccagttcagcccttggctccaagaatctcttggatgttacgtgttccagcttgtccgtgacccaggaggaggcagaacaactgctccaagccctgcaccgnctcaccaggctggccgtgttccgtgacctctcctccgccgaggcgattctggcactctttcctgaaaatttccaccaaaacctcaaaaacctgctgacaaaaatcatcctggaacacgtatctgcttggagagctgaagcccaagtgaatcagatctctctgccgcgcctggtggacctggacttggaggtggacatcaaaacctnctcagacagcatcag

SEQ ID NO: 2885 - DNA, 432 bp, Bos taurus
  Clone ID: 17-LIB3058-036-Q1-K1-E9
ggcactaagttgataagattttaaagcttctaccatgagcaagatgctatttgaaggagtatatcagtatgcaaaaacaatagagcattcaaaatttaaagtatttgcaaggcacagagcaagttcttgtttactgcagaactgcttgaaaaggtgcttatcacaagcttggtatcacgaccactggtgccctgcctgcaactcccaactctgacaggtgctatatcttgcctaatggatacaatgtaaagtcattcctcttggacaaacattttaatcaaaaccagaaagaacaatccattgaaattatttgtttagagtatgttgttatataattaatacataattttattttttaaaaataatcacaaataaagctaaaattctcctttaatcacttaattcttttaagataagttatgctgatatact

SEQ ID NO: 2886 - DNA, 426 bp, Bos taurus
  Clone ID: 17-LIB3058-040-Q1-K1-E1
ccacgcgtccgtgcgaggaagtggtctcaggatggcccctggtatcaactggccactctccatgcccatggcgatgaccaacattaataatcagtgtggcatcctttgctttaaacccaggatccctcccagtgctgcattctaagtaaccaaacttttgaatttggtgagatcacattaattgtcatccctttctagaacctagaaattgaagcctctcaaaagagttcctgttcaaggaaaactgactaccagggcaaatttgggtgcagcagctgttggatcatcatttctaagttgttgcttcgggctcagataagttgcaagactcacaggagagagaaaaggtgattcagtgtaccttttaaaacaaatgacaaatttcagaacaaatctacattagattatatgtaaaaacaggtgaca

SEQ ID NO: 2887 - DNA, 304 bp, Bos taurus
  Clone ID: 17-LIB3058-042-Q1-K1-E1
cggacgcgtgggcaaaccccggggtgctcactgccatgtagccaggaaacgtggacatgggtgatgaggttgtggcccagagcactgtgcccatggggcggggcacgacaaaccgatgggcaagagctggggcccccagcctgtctcaggagtgtgctcacttgctaaggcgcctgagggccgttcggctgaaggaatcctgtgctcggggccttggctgcagtggacgagtggggctgaacctagggaggtggggcagcgctgagacctcggaaaagggttccgctttggtgtcctggtggga

SEQ ID NO: 2888 - DNA, 401 bp, Bos taurus
  Clone ID: 17-LIB3058-044-Q1-K1-E1
gtcacttcagtggggttatccctgagttgagagcttagccgagcagtcaactgtgacccctgggcgcaggctctccaagaagggtcgtccctgcactggctgggccagctactcagtgttgcagagcctcgccctcttttcccaccatgtcattgctgctaatggtcaaggtcaaatatatggccacatggaatgggccaggtcctctcaggctcctttgtggatgcgattttttttttaagaatgcaaacatgcaggtgccttcccgagaggcttggactggtgtctccaaccagaaacaagataagctaatcagagtatgaactcatgaagagggatgtcagcagactgtgtaacagctggaaaacgttcacgtaccggcctttaggacaacccaaggg

SEQ ID NO: 2889 - DNA, 436 bp, Bos taurus
  Clone ID: 17-LIB3058-052-Q1-K1-E9
cgggactccgtccatcctgctgcaaagagccctttgcgccagagaaggaaggactgcctgtggccctctgtgcctgcccatcctccagcccctcagaacccccgccccaacccccgggtggggtttggctttggaaggggtcctggaagcttctggaagtcctgttgttctcccaggtgaggtctttgggaggagagcctctggctggctcccttcccaaaccttgggtacaggaggaacacaggctggagccggtgtgtgacggtaccgggctggggtgtggggtttatggagggctatctggtctctagtgccttagctgtgagagggccagtgaagcctttgctctgaatgtgctttccgcattgggctcaacccaattgggctcaaaccgcattgggtcttctgtcttttgattttagtcttcaaaatagat

SEQ ID NO: 2890 - DNA, 434 bp, Bos taurus
  unsure (422): Clone ID: 17-LIB3058-054-Q1-K1-E1
gcagaacgccagctccaccgtccctgtcgtgcagaacctgctcttcctctgtggcagccggaagtgaggaggccccgggccaggccccgagcagatgccaccacctccagatgtcctgggtgtcccccgagaccctgcctcgtgacacccggcctgcctgggccctggtggaactgctggggggctctgaggatcctccctgaatgggtcggcctcgggggacggactgagccggtgactgtgacacgatggcaaccccacgtaaggccagggtggatcaggtggacgctgcggcgtctccacgtcccttccaacactgggagaaaagctcgtggatacagcacacgggcaccctgccaagtggtgtccaggtcctgacggccaggcctgctttcgggtggacgtggcagagccctgagctncttttggagtgt

SEQ ID NO: 2891 - DNA, 186 bp, Bos taurus
  Clone ID: 18-LIB3058-003-Q1-K1-E5
gcagatagctgactagacaaagtgtgcgctttctgacagtgcccaaccctgcctgagttgggtctcacaatacccatgctaatgtgcccaacgagctacagccacagtacagaattatgcagaggacctgtgtggtgagctagacggccgataagtgctggcatgcctataccacatagatgagct

SEQ ID NO: 2892 - DNA, 252 bp, Bos taurus
  Clone ID: 18-LIB3058-003-Q1-K1-E9
acggtaacacctattgtaaagttctagagccttattactgctattctcggatcccataatagtgtcaccaatggggcagacgacaacgcatacgttgactgcgtgccgtctgagtacatgcattctaaaaactgattcgctagcatatatctgggacatactagcccaaaggcagcatggtgctgtcagatgcacagacctgctgatatcaatcgaagacgcgttaacagtgtactgaactttggatatcta

SEQ ID NO: 2893 - DNA, 326 bp, Bos taurus
  unsure (111),(115)...(116),(120),(122)...(123),(125),(129): unsure at all n locations; Clone ID: 18-LIB3058-007-Q1-K1-E5
taccgtccgaattcccggtcacccaccgtccgatgcccactgttgtcacaatttagatgagcaagaatggacagaactgtgtgtgtgtgtgtgtgtgtgtgtgtgtgtgtncccnngtgngnncntctnaactgccgtccacactcccagcccacccttactccacccgagccaactcacgacccatactcaccacgtaaaccttcgcaaccacgacagcctacatgacgtaactcactgacccaatccccacttacacctccaaggctcactcactccagcaccacaacaaggccctgcaccaccagcaaagacagatactgacc

SEQ ID NO: 2894 - DNA, 410 bp, Bos taurus
  Clone ID: 18-LIB3058-008-Q1-K1-E5
cttgaattggcctaattataaaagtataaaccttctgggagatttaggtgatagtgaactaggaaaaagagattcaggtgtcaaggcaatattgattgacgttacaaactaatgcttgtaattgcttgttcacttcatttatatttccttaattactctccaaaaagcttaacacgtggtaagattcagtttctattgtgtaattcactgatcacagaatggagatactgaaagtcacagaatagaagcctgcctttaaggagaaaagatgagaatggaacatttcctatctgcctgttacatcccaggcattttcatttataatctcacttaatcattactctcatttagtcctcatcattatctgaatttagccaccactccttttataaagttacacagtctctctg

SEQ ID NO: 2895 - DNA, 344 bp, Bos taurus
  unsure (258): Clone ID: 18-LIB3058-008-Q1-K1-E9
gcagactttattgcttcttaactgactagaaagagccaccagcatcactctgtgcctttggactcagtttgtgcgtctgtaggacatgtgtgtgctccattcacacggtatttacaatactgtaatgaatctgaattacacatcctacagtcagtagataatagtgtaaccttcaacatttcagtgctctcatgagtgttctttaagtgctatgtaaatctccccattacttatatggatataacggacttacctgangaaggagagcacgcatcgcatggggagtggtaaccaaggtgaattttacaaactggtgtgtagtagatttaaatactcaaactaaa

SEQ ID NO: 2896 - DNA, 374 bp, Bos taurus
  Clone ID: 18-LIB3058-009-Q1-K1-E5
aagctgcctaccctgagtcagtgctcccagcggacagtgcgaggcttgcagaagcagggggtgcctagccttcactgggaagcacaagaagcaaaggcaggttccaaagtgcctcactcagaaggtggccccagccccctggagggagccagggtgtaccgcaagaccttgactgaggcttaggatgtgagatgccatgaactttgctgaacagtgtctctgttcagcaaactaaccagcattccccacagcacagtctagggcagacgatagtatagaggagtgttggaagaacctagggtccctttgtccctgtaacctcagttgtctaggcagaaacctggctttatgctatataatggtcgaaaatattc

SEQ ID NO: 2897 - DNA, 434 bp, Bos taurus
  Clone ID: 18-LIB3058-010-Q1-K1-E5
gaaacaatcttctctgaacagcgaagcccctgctttgtgctcacaggtgggtgtgttaagactcacctacagctgaaccagccaaggctggaagaggctggccaggcagtgccttgcccaggcttgcacagctagcgggtcttcccaagcctgcctgatcgccagaccctctgctactccacgaccccaccatcctacccagcttcttcattcattctatcagcaaaacagtgctgcgtggccaccagagccaggctgtctgcaccacggaggggactccacaggagcaaaagcagacgtgtctgtgcatactggaagaatctcacaaataaacacacgtgtgcaaacggagccaaacggtgaggcaagaggcacagatgagtgcagggtcaggggagcctggagctggccagccggtccttatgctgagggca

SEQ ID NO: 2898 - DNA, 422 bp, Bos taurus
  Clone ID: 18-LIB3058-012-Q1-K1-E5
cttgagcttcaggaaagaaaaccgtcctggggtacagaaaactcagaactttttggttttcaaacttagaaggctttttaagtctcttgggctatttgaaagtgttggtacatacaatgacgtttaggcaccagtattaagggaaataaaagcctttttcaaaatgaagcttccacagtgtccatgcatttgggaaatactgtatttgatttttttttttttgcatgtatgattatactatgagagacaggattgacagtgtagaagatggcaaggcaaaaatctaattagagagactattaattttctacaaaataaactttgttcatcaatacaaacctgctttcaaatcaaatcagacctccttcggaatgtgttcagaacccaaacatcatgtcaatggcaacagaacagttgaacct

SEQ ID NO: 2899 - DNA, 195 bp, Bos taurus
  Clone ID: 18-LIB3058-017-Q1-K1-E5
taatttttctatttaaaatatcaagttgtaagataaaagcatgtaagataacatgcttttaaaattggtttctatgttcatttgttaatagtgtcagattttacattattaaaaaataatgtcattaaaaatactgtcattttttggtagagaacattttggcatctctgagttttaaaataaatctctgagtaa

SEQ ID NO: 2900 - DNA, 275 bp, Bos taurus
  Clone ID: 18-LIB3058-017-Q1-K1-E9
acgcggacgcgtgggtgcacctggcttgaggaggctgatcctggtggcttgcgtctcgagagtctgagcccgtgtgtgtaatgccttccccacccctttcagcctggtcccttccggactgggtgtaccggcctgcttcctgagtctctgcctgatctgcgcatgtgcatgtccatgcctgtccatgccatacagactctgctagtctgagtcctgctgcctgcttgaggctaaccagtccggctcaggcaggaagtctgcatggagccagttca

SEQ ID NO: 2901 - DNA, 325 bp, Bos taurus
  Clone ID: 18-LIB3058-020-Q1-K1-E5
gactgactcagaaacctcgggattgtcaggccccaggtctttgcccgcggcgtggacctcggtcgcccacccgcatcttctggcggcccatttctctctatccccaccctgggcctcaaggcaggtcgacaggctgggacacttctccatcgcagtcccaggcccgggagatcaactcccagcaccgcgtttccctgctattccgcagctgctcacggacctgccattttcccctgcatcatcgggcttctgggagtcaccctaagggcagatccttctgggtccctggctgcttgaacagagtttcttccgggctcctgcctga

SEQ ID NO: 2902 - DNA, 389 bp, Bos taurus
  Clone ID: 18-LIB3058-020-Q1-K1-E9
gctcctctaccttgagtgtcattaggtgtctagtctgggggagaggcagtgtatccgtgcggccggatacttggctcccaggagcactgaatcagcgcttcctaataccagccactgggctgaagacgtaagaaacgatcattgtgccccaggatcgggtggtgagctacagctgaaatgttatttgtaaggaagtatgatccgtgcttaacaagaggcgagacagagcgtgatagacagcgtgtcatcaggaccgtgttatgggtcacattctatcgaaactgtcagagactcacgtgcatggatcagtgcattgagtaatcgttactagacacgggtgtgtgtcttacatgatgaatgagcagaatgcgctagtatcatgatattga

SEQ ID NO: 2903 - DNA, 163 bp, Bos taurus
  Clone ID: 18-LIB3058-022-Q1-K1-E5
ttgaaactctgtataacctatcataatgattatgctcagtatgcctacaacgtataccttggacaggcattacatcgtaatgtaatcatgactaatggactttaaataccatcgtggctattcaacttctataacacttacaggcaaaaattatttaacacta

SEQ ID NO: 2904 - DNA, 254 bp, Bos taurus
  Clone ID: 18-LIB3058-022-Q1-K1-E9
ttctagatcgcgagcggccgcccttttttttttttatgcttatgagtcatcattatcaatacaagggttttactttatttcattactcatgaacagtgcttactttccttgagacccttgctcacagttctcacatgttggatgttgtcactaatggacagtactaattcacttccaagtgattaactcaaagtatctatcctgcaatctggagaatttactccttaaaatatccggatttttgatgcatcctc

SEQ ID NO: 2905 - DNA, 385 bp, Bos taurus
  Clone ID: 18-LIB3058-024-Q1-K1-E5
ccgggagccaagaggaagcaggctgtgggggtgcccccagcaccctgagaggactcagaggccgtggcggggttggggaggtgtgggcgcccctgatgattcacgtggtcggctgggcggatgtggccttctgtcctacttgggctcgaacgtaccccatgtagcgctgcacacatcttcagctttgggaaagcgcccttcccactggtaggccgggagagagctactggtagagagctgcagggaacagtgcgcccagcgtgctggaacctatgcctgtggatccccctgaggcccgatgtggctgccgcttagcccaggacagtccacttgcgaatttgtgctgctggttttgtatttactccttggcactgcttttacggat

SEQ ID NO: 2906 - DNA, 436 bp, Bos taurus
  Clone ID: 18-LIB3058-029-Q1-K1-E5
aaaaacaacaaaaaaaactgagagaaaacctatcagaaggactaaaagtgcgcgcttgcgtcagggttggctcaggcggtgagcttcatgctgggcatctgtgcagagccaccttttggattgcatggttggactgagatctactgggagaaattatatatgtatatatatttatacaacttatgtatacatatatatatgtatacacacagacacaagacacacaccaccaaccactacaccacacatgcttgtaacaggcactagaacgaagagggacaagatacacagccagagcagcaagccttagcattaagaatatacagtatgccggaactgggcttcgtgcctcctagcctaggaaactcataagaaatacccttttgacacaaaacgcaaaatgttttccaaaacaattgacatatgattcattacg

SEQ ID NO: 2907 - DNA, 225 bp, Bos taurus
  Clone ID: 18-LIB3058-031-Q1-K1-E5
ggggcctgttcacccacagcacacagtgcttcatcctgttttcatcctgaattcctcggagggctgcgctggcatcgggtgactgcagtgggtcaacgtaacccttgtagaaactgggtggtgagcaatgcgcttttgttcttctttgttcccagcggccattctgattggcttcattcccaaattctggactggccaccgtctttacacatctcttcccacaca

SEQ ID NO: 2908 - DNA, 130 bp, Bos taurus
  Clone ID: 18-LIB3058-032-Q1-K1-E9
ccataaatgtactttctgaattcattttttttattaacaattcaataatatttaggtgttaattttaaaaagtattaaattattatcataatttaatatattttattttatatatatattttaaaatatt

SEQ ID NO: 2909 - DNA, 434 bp, Bos taurus
  Clone ID: 18-LIB3058-036-Q1-K1-E5
cagggccctggaccctccctttttccctaaggacacctagatatttcactggaggaggctcactcaggtaaccctggacatggcatgtaggaaagttgttttgtttctttttaattttttaagttatgaaaatattataacatatatataggagacttggaaaatacagaacaaagttacgtatagttccactgtatgttacgattattcttttaggtagataaattaagattttttagttggggtttcaatatcaaactctcaaaaattaacagaatgaatagaaaaatagaaggatataacagacctgaaaagcactacaaaccaattcaacataattaacattcatacagtggaaagtttttgctcttttaattagatacagaggctgcctattctgtgctgatttccctggactcttattctcccaatgc

SEQ ID NO: 2910 - DNA, 386 bp, Bos taurus
  Clone ID: 18-LIB3058-037-Q1-K1-E5
cggcgatatctacgtagactctcctgtcaacgtcaatcaagatactagtcgacaaaggacgaaatcttaccttgacatcctggaccaagtgagagactacaaaagaagacgccagacctatagagctaagaacgttcacataaccaagaagtcatacaccgaggtgatccgcgacgtgatcaacgtgcatatggaggagctgagcagccactggcaggaggagcacgagaaggacgcacatggggccgacacgagcgaagaacgacagccggcctcagtggactcgaggcattacggcgggagccatctggacggcgagtgctcacggcatagacgggaccgaagtcggagcccacacaggccgaaaagaaataaggacaaggaca

SEQ ID NO: 2911 - DNA, 72 bp, Bos taurus
  Clone ID: 18-LIB3058-038-Q1-K1-E9
cacactgttggatttaagtattgagtctaattataatcaatacttaaatccaacagtgtgcggtctcgttgt

SEQ ID NO: 2912 - DNA, 138 bp, Bos taurus
  Clone ID: 18-LIB3058-041-Q1-K1-E9
cacaacaaaagcagcagagcccaacaaccgcggcagcaaacacggaaaggccgaagcagccaaagcggagaccaacgcccgcaacccccgcgacccaaacaaagggcaagcaaccacgccaacaccagaccaggccac

SEQ ID NO: 2913 - DNA, 386 bp, Bos taurus
  unsure (323),(363): unsure at all n locations; Clone ID: 18-LIB3058-042-Q1-K1-E5
ctcccctgggcactgcaaaccctggctgtggattacggatcctatattcggctgaacagcagggggttgatctactccgtgggcttgctcctggcctccgtcttcgtcacggtgttcggcgtccacctgaacaagtggcagctggacaggaagctggggtgcgggtgccttttcctatacggcgtgttcctgtgcttctccatcatgacggagttcaacgtgttcacgtttgtgaacctgcccatgtgcggggaccactgacccgcggccgcgcccagctcggcccctccttctgtgcaatacaagcgggcgcccgagtccgncttcgcgctgcccgcaggcctttcgccccctcgactcctnctgggccctgcccctacccccct

SEQ ID NO: 2914 - DNA, 452 bp, Bos taurus
  Clone ID: 18-LIB3058-043-Q1-K1-E5
gtaaccttgcattcggctgcaaggtgtactgtacgtacacaggtgctggtcgatgtccactttctgcttttctttctttctttttttctttttaaaaataattaaaaataattccccccgcagtgaacccaactgactcctccgatgtaattgatcttccagtctggtggaattgggagtcttaacatgtgaaaccaatttagtgtaatgtaattggctttcaaatggtttctctgtgctattttttggaattcattgtgatactagagataccttaagtctttgatccaactgaaagtttgtatttattttctttggaaataatatattgtgtctgtgcagaaaaaaagtagcaaaaaggattgctttactccaagaggaggagagtttatcttattaggattgttacaaacctctaagctgatgtttaatataacagactgaagtaaaca

SEQ ID NO: 2915 - DNA, 433 bp, Bos taurus
  Clone ID: 18-LIB3058-044-Q1-K1-E5
gtgtgtttaaaacaagaatagaacttttttaaggaatcatgcatagaaggaatccttggtttattttaaaatgaattgtaaagctggtgtttctttgttgctacaagctatttgcccaagttaatgcaaacgaacacattttatatgtcaggaaaaaaaaaacacataaaaaaagcaaagaaaaaaaatgcttgagctttttctaacctctccctgcagtctgttgtgtgagcagcctgttttttcctctaatattgtgtcagtttattctctttaatggactgtaaaaaaatgtaatcacaagagtgccaaatatcttgaaatgccaaaaggcattttggtttcttttcttttccctgtgctctgagtccacgtaaaggaatgctcggagtgtctttttctgttatttataggggttctcttaaggcacacc

SEQ ID NO: 2916 - DNA, 432 bp, Bos taurus
  unsure (402): Clone ID: 18-LIB3058-044-Q1-K1-E9
gcggccccttgcaggctggaactctgctgtgaaaacaggtgcagccgagttcatccaaaagatttttttaaaaaagactcaaaacaaaaactttccactcagagcaggcaagctttgctttttttcaaataagtgttacttaacagaaggtcttgtagagctcgtaaaaccctggaacatctggtaaacggtgtcagttttacacgtcctccaacacagggtacatgactcgtgtttccactggcgtaactcaaggacgctggtgcgtctccgggcatcccgcccatcctgattttcatgggattgtcccaagccagcagatctgtctctccttccaccaggccagcaacagacaacagaaaacctcagaacccagacacaggaggcgagagagatggcggngagagtggaagccgccgaggacgtcatcgc

SEQ ID NO: 2917 - DNA, 440 bp, Bos taurus
  Clone ID: 18-LIB3058-045-Q1-K1-E5
gagcgcgagcggccgcccttttttttttttttttttttttgggaaagacagtatttagtttaggaaaaaatggagcaaatcaaactcttaggagcctcaaatctcaaaaccatctatttactatagtatacattagacaaccttaaaattgcagtatgaagattacaacatggactgaagaaatttttctttactacacaaaaaataacctagcaacaaaaatccactttttttttttcctttctggggaaaaaaaaggggcatggtttgataatgaacaaattttgaataaatcctatcaaaatttacctatgccatttaattctgaaaattttatccgtaatttagtgttctggttgtaactttgctaacaaaatgtttaacctccaaagcagcagtcatttacagcaaatctggtaccaacatcaaaggaaaataat

SEQ ID NO: 2918 - DNA, 389 bp, Bos taurus
  Clone ID: 18-LIB3058-049-Q1-K1-E5
gtggttcccattacaaatgccgttagtagctcttgccgaaatagaccctctcacggggggcaggttaaaaactgaggatactaaacctggagggtcttcctcagaacgtatataccagaaagtatacacattaatatcccaagcatcataggctaaataattctatcttcagaaggttagaattggacagatgtatagtagtatataggcatggtgaactaaactgaggcattgattcttatgaattatagtataaagatttgtatcctgacctacttgatcaggagagacatatcatgtgtaaatttgaggcatatcgtgaagacttatgacaagagtaaaaccctttcttacctcattcacagtcactaatgcgtaaagtgttaaca

SEQ ID NO: 2919 - DNA, 421 bp, Bos taurus
  Clone ID: 18-LIB3058-050-Q1-K1-E9
cggacgcgtgggtgggccaccctccccttgccaggcctaccttcttccctgcctccgctgtgcctcttggctggcatctccgctgacccaggagggcgtggaggggctgtccactgccgggggccctggcccctctctccctgcccctgggcaggacgccttcttctgcagggaccagtctctccctccttcccagagggaccagacggacgcctctgaccgtctccttcctgacgggcctgttgacctgccgctggagtcaccagctccagcgcctttcgggggccaggcaggtgacacaggcgaatccaggctggatgcgtcctgcggggcggccccgtcaggctgccttggtgtcagaacacctgggtggtggggactggggtgaactggggtagatacactgaaaccaagaggggag

SEQ ID NO: 2920 - DNA, 416 bp, Bos taurus
  Clone ID: 18-LIB3058-054-Q1-K1-E5
ctcaaagcctagctgctatagttcacattataggatctcttcctattagattgctactgcattgaaaggttgcagcttcctagagttctttttaagaacaaactatggttatttttaagttgttgctttgagggaaccgaagaacctaaaatagcccctggccagtattgctctgaggtctcaagtgttatttctctgggaaactttgtacatggtacaggagttgaagagtagcattgtcttgccttaatttctgtactgggaatttcaggaaataaattgttaagaggaattcaaacacatggcctatcttactttcatttaattattttgaacaattgaaatcttgctagacactggtttctctgactgggtcttgatagccaactgcttcttacgcaagtcaccttttcagt

SEQ ID NO: 2921 - DNA, 344 bp, Bos taurus
  unsure (82): Clone ID: 19-LIB3058-002-Q1-K1-E11
cttcagttccgtcccgttcgtgacgacctccggtcccgggagggggagggggagggggagggagaggcgaggtcatggcctncggcaccggctccggccagccgcaacccgcagcagctgatgctgacccgggagccggcgacaacaagctcgtcttcgagacgccgctgcagccgcagcccgtgagggaggactacgtcgagaacgccgtcaagttcctctcccacccaaaggtcaggggctcccccgtcgtctacagacgatccttcctcgagaagaagggcctcaccacacaggagatcgacgaggccctacgaagagtccctgatcctgaacccatcact

SEQ ID NO: 2922 - DNA, 374 bp, Bos taurus
  Clone ID: 19-LIB3058-004-Q1-K1-E11
gagacacaccgtggtacccgctcctgcggtgcatgagcatgctttgggcacagaggctgacccgcaaggtctcaccgcgcacggggaatgcagcagtcgagtggatcagccaacagcgtgtcagcctgtaccggtgctcagagaggcacgagctctcagagctggacaagaaccgtgtgaagcacatggggcatggcaccactggctacgaggatgtagcagatttaacagccactgatgtcatgagtgctgtaaacctactgatactcgcatgactagatgaatgaccaccagaacactgtctgctatgtgctcatcaaccgcgcgctcgatacgcgactggagcccaatgacattgtatatctcatccgctc

SEQ ID NO: 2923 - DNA, 262 bp, Bos taurus
  Clone ID: 19-LIB3058-004-Q1-K1-E3
gttctagatcgcgagcggccgcccttttttatttatatttgtgttcttttcatctcatactggatatctattaataataagagagaaatctgtccaggctctgcttgagacaaactggaacacttaaaactccaaggcatgctggacgtgctgtactgcctcatatatagagttgtcaggacgtgacaaggtatagaccgatcatgcacatatgtccttacaacttcctttccaagccgagagcattgcactataatgtgag

SEQ ID NO: 2924 - DNA, 290 bp, Bos taurus
  Clone ID: 19-LIB3058-006-Q1-K1-E11
ctagttctagatcgcgagcggccgccctttttttttttttttaattcacttaaacattttagtttttttcttttttgcatgtgggagtatcttatatattaattataaaatagccaataggtatttcaatgatagaaattagacacatgttcactacattgtcttactaataaagctgtcttattatgtgtctcatgattaataattatactggagagtttaatacaccttaattatagtgatcatctactatatagtgactttataatgcatactaagtatcttgatct

SEQ ID NO: 2925 - DNA, 187 bp, Bos taurus
  Clone ID: 19-LIB3058-007-Q1-K1-E11
agggccgtgcatggtggcagggccacggtggtgcccccagagcgaggacgtcagctcttccttggaaccacctctagtcaaaacacccacacatgtacgtgtatgcgtcagacgtgaaagctgatggatggtgtggaggattccaggcgagaagggaggcgtggactccagccctggccaaagccta

SEQ ID NO: 2926 - DNA, 219 bp, Bos taurus
  Clone ID: 19-LIB3058-009-Q1-K1-E11
cgactctgggctcctgttcctggcagcatgtctgcacccccttgctcagggtctggagggacaaggcgccccgccccgccccccagccaaggactcgcgttttggccacagcttgtgctgacagtgcatcaggggcgcagccgtgagcattttaaggtggtctgtggagtgagccccgaaaactgatcgcttcttcgactttgagttctatgctcttat

SEQ ID NO: 2927 - DNA, 421 bp, Bos taurus
  Clone ID: 19-LIB3058-010-Q1-K1-E11
agttgcacctccatcaatagtcccacctctatcagccttcagtaagctcaagatggtaagtgggtcactcctatgaaaagtcccaaccaggaagtcgccggcagcctcctcttccccatgcagatgagtccacagtgcagggcagatgttgaggtggtgtaggacacagtcctctgtgtttgatgaggggaagtaggaggagagcttcagaccgtgtagcacagttccagggactgaatgcctccatgtagcacagaagcccgcaggggccagagtgggtggcggccagcagggtgcaagtgcgggaagctcttccaggctgggtggccctgactgagggcttggacctcagaaggaacaagatgggggaatgggggaggcggtggtcgatgccaggagatcgtacattctgcacttttgc

SEQ ID NO: 2928 - DNA, 435 bp, Bos taurus
  unsure (1): Clone ID: 19-LIB3058-010-Q1-K1-E3
nccactttgtacaaccagtctcttccacaggctggctctgactcggacttttcctgggggatgtgtggttgcgggaggctcctatgagggtcggggaacctggcactccaagagctgctcggctggaggaacgggcgctggaggcagagctggctacatgcaaggagctggtcttcgccacctcctgccgcctgtctcaccactcgtgacatgcggaacaaccagagaaagaaagggtggggatggtggacaaggaagccgcggctgttctgcttttgtgtggcaagcaaacaggtacagggtgggttgaagggctctgcagtggggccaaagactccaacctgagccacaggcgagcttgcacataacatcatccacttcccaagaaaggactgtggaccccctgtccggttcccagctggctttgttggtgtg

SEQ ID NO: 2929 - DNA, 71 bp, Bos taurus
  Clone ID: 19-LIB3058-011-Q1-K1-E3
gttatagatagcgagcggtcgtcctattttcattgacctgaaacatataattaacttggtatggattaata

SEQ ID NO: 2930 - DNA, 285 bp, Bos taurus
  Clone ID: 19-LIB3058-012-Q1-K1-E3
caatgatgcatcatacctgatgggatttccatcaccagcgctgaatgttctgggtcacgtgcatgatccaagttttattgcctgaacctcactcactaggactgcctgtgctaaggcacagtttgcaccatatggactaccagtcatgggctattggaagacgaacttgtatagatgctaaatactagccatgacatccagttgatgatgtgggaaacctgctcgaggcccccaaccttctaggacatggggcccccatctccagggagatgccttcatttccca

SEQ ID NO: 2931 - DNA, 64 bp, Bos taurus
  Clone ID: 19-LIB3058-014-Q1-K1-E3
ctagattgagagccgaaacttttcaattatctaagactctatatgtgtgaagatatggtcacat

SEQ ID NO: 2932 - DNA, 267 bp, Bos taurus
  Clone ID: 19-LIB3058-015-Q1-K1-E11
gcgagcggccgcccttttttcttttaatttttgtttgctttttgttttttaatgctaaacccaggtatcttttaaagcttggcttgccgatcgatattccctgacaactgggaacaccataccacgtcctttaagcccaaccgcatacctttccaaacactgtatacaggcagtttaagtcattagatgttcgtcataagtccgagaaaaaaccgctagactaacccaggtattttggcttcaaatagtcacccacttcctccttgt

SEQ ID NO: 2933 - DNA, 129 bp, Bos taurus
  Clone ID: 19-LIB3058-016-Q1-K1-E3
cttttctataatgttaaaaaagatgcttttggtctatgttgaccaccaaggtgagataggcacgatgaaatggaaagagtcaagtcctgcagtgtgaggagccaagatgcatacggctgaagttttatg

SEQ ID NO: 2934 - DNA, 436 bp, Bos taurus
  Clone ID: 19-LIB3058-019-Q1-K1-E11
tttaaaaaataaattcaagttttagggaataaaattaaggagaaaaacaaaccatccgtccaaccacatactgaaatatttttaaaactcaaccagcaatttttaaaacctcaaaatagttttaagacttccgtttgttgaaaaagaaaaaaaatttggttgtgaaagagagctggcatgttcttcctaagaaattgccatccatggttaaaaaaaagagagagagagagacatagaaagcaaatcaccacaaactgcctctgattaacatttcatttaaacttttaaagtatcagggttttgaatatcttccttgactcagcgttactagacacgggtctgtttcttacatgatgaattaggagaaagcgcttggttcaagatattgaaaaatagaggtgggtttgagcctaggggtgaagagaatgagctgcta

SEQ ID NO: 2935 - DNA, 422 bp, Bos taurus
  Clone ID: 19-LIB3058-021-Q1-K1-E11
ccagggtgcgcttcgccaatgatgaccggcatcgcctggcctgttgctcacttgatggcagcatctcactgtgccagctggtacctgccccgcccactgtgctccgagtgctgcggggccacactcgcggggtctccgactttgcctggtctctctccaatgacatccttgtgtccacctcccttgatgccaccatgcgcatctgggcctctgaggatggccgctgcatccgggagatccctgaccctgactgcgccgaactgctctgctgcaccttccagccggtcaacatcaaccttactgtggtggggaatgccaagcacaatgtgcacgtcatgaacatctccacgggcaagaaagtgaagggtgtgtccagcaagctgacgggccgcgtccttgctctgtcctttgatgcctctggc

SEQ ID NO: 2936 - DNA, 450 bp, Bos taurus
  Clone ID: 19-LIB3058-021-Q1-K1-E3
tctagatcgcgagcggccgccctttttttttttttttttttcaggggaaaccaggtggaatcttgactcagagaaaagcgacagagctaacggctcacgcggggcaggaggggcggcagcaagagggaactgccagcaggggcacgatcacagggatcacagcgggtgcggcttcgggcgacggcggccacaggtgcgggcggcgtggggcgccggaggggctgcgactcagaggccctcactgcggggctggaggcggcgtgctccccgccaacttctgcgccgcctccttctcttcctgcagcgaggcgtccccggggggcttcccggagggcttcccggtgggcttcctggagggctcggtgaccgccgccgcggccgccgcgcgggcttgctccctttttaattaaccaagtcttaccgtgattatttaaaaatcttctataaatc

SEQ ID NO: 2937 - DNA, 326 bp, Bos taurus
  Clone ID: 19-LIB3058-022-Q1-K1-E3
acgcgtggatggagagtcggtgggatctctttactgcctctggactggaggccgagcgcccgcccgcggccgagccccgcgcccggcgtctccgcccggggtgctctccgcagtttcctggcttggaagcctcgggaacatggcgaggcagcggtggtttaacgggaaggacggtgactgttagcctgtgaacgaaagcgagagtgagccgtctcacgctccggaccaagagtgatcttgaacttgtggctgctactagatttttgcccacacctcctcgtatgctgcggcttctccactggagtggggccagtgtgaccgtggac

SEQ ID NO: 2938 - DNA, 410 bp, Bos taurus
  Clone ID: 19-LIB3058-023-Q1-K1-E3
cagccgtgagcacaccacaggagttcgccctgctgacccacagtgccagcacttgcgaagggatgctcccgggaagggatgctcccaggtggagtgacacccagcgacaggagggctgagggggacccttcttctccagcccgctgcgtgtttccttgaggccagggtcggagacccacagggcccgtggacagtctcacctcgtctcagcagccgttcaccaccttttgcacaggggttcccgggccttacactgacgtctgagctctgtcatgtcatcctgttcccctggattctcaaatccgtgccccctcaaatgccctaaggagctgggaggacacaggtaggaaagcgaccgggaggcagcatccactctttggggaaagcgcctcccgctgaagtcctcctct

SEQ ID NO: 2939 - DNA, 402 bp, Bos taurus
  Clone ID: 19-LIB3058-024-Q1-K1-E3
ctgcaggctcctggccagcggctcaatggagaagacggtgcagctgtcagctcacccttgaagatcagcgaggtccctgagggtccagggtgggcgacccttcacgcccaccttctgccctgggacggccttggacgcggccctggggaccctgccgccggtcccccatgcagagtgtggagaccggcctgtggctctgagcttcctttggtttctttcccgcctcctctcacctcttaaagcacttcctttcctaaccgatcacagtggagcggcttcgcggcgggagctttggtacgtggcaggcgggcgggcagctgggagtgtcccgtgtggtggccgctgctcacaccccggaggagccggatcggcgcgtgcggagaagggacgcggtgcggactc

SEQ ID NO: 2940 - DNA, 438 bp, Bos taurus
  Clone ID: 19-LIB3058-025-Q1-K1-E3
gccatgttgtttttatttgctacttttttcagtgttctgtgtatcttaagctgttgcagaatcatttttctggcaaaatacctttgtcaagccaaaaatttttggcctcatgggagctgatgcagtcaacttcttggtgactttagtggaccttttaagcctgtagttctacttcatacctttagttttttgggttttgtttttgttttttaacttccaaagaaaacccacttctttctgatctaaaaactcatctttgaggtaaagagttaagtgtccaaaggttcatgaggtcagagggagctagcctggcacctggactgtgcccctccatagctgacagattccaacagaagtgtatttaaattctccagtagacagtactgggcaaggcaagggagggggtagggttgggctattaagatacaggctactgta

SEQ ID NO: 2941 - DNA, 402 bp, Bos taurus
  Clone ID: 19-LIB3058-027-Q1-K1-E11
gtccgctgagactgtccaccagtcagaactgcctcactgagagccttgaagatgtggtcattggcatgcagctgtctctgtccaagggaatcagaggcaatgagcccatacatacattaactcctcaggactgcattaattcttgctgctcaacaaaaaatatatcaggggacaaagcatgtaacctgatgatcttcgacactcaaaaaaaatttaaactacccaactgctacctgttcttctgtcccagtgaggaagcctgtcccctgaaaccagcaaagggacttatgagttacaggataattcgaggtttcccatctttggccagaactgatttgccaaaccccagggtagctcatgaaaactccatcttccctggcggatcttgccatgccataactc

SEQ ID NO: 2942 - DNA, 308 bp, Bos taurus
  Clone ID: 19-LIB3058-027-Q1-K1-E3
gtccgattttatttcacgctttctaaggagtaggagttccttccggcttcaagaagtatgctgtgggcaggttcggcaggaggcgtctcagtcactttccggcctaaacctcgctgggggcgccgagaaggaaacggtggggaaagcgagggacagcggtggctcgctccctccttcccgggagtgctccgtgaccgcggggcgggcgggagggcgatcgggcagcctttcgggtgggcggggagcggggcggtcaggtggtttgcaaggagcgctctttaccccaaggggaaagttagaggccctcc

SEQ ID NO: 2943 - DNA, 446 bp, Bos taurus
  Clone ID: 19-LIB3058-029-Q1-K1-E3
tgttcatcagcattatcttggcttttaagggttacttgattagctgtgtttggaactgctaccgatatatcaatggcaggaactcctctgatgtcctggtttatgttaccagcaacgacactacggtgctgctacccccgtacgatgatgccactgtgaacagcgccaccaaggagccgccgcccccgtacgtgtctgcctgagcctggaagttgggcagcatgagagcaacagccagacttgtcattcatcagagcaatagttctttaatttttcttctgagatgagctctctgagcttatttgttgcagaaatgctacagtttaaaattttagatgttaagttgaaactctgtagtttgaaacctatgctttagctggagcaccttgctagagtagctgtagatattctctcggtggggtggggtggggtgggctcccctagtt

SEQ ID NO: 2944 - DNA, 208 bp, Bos taurus
  Clone ID: 19-LIB3058-030-Q1-K1-E3
ctagatcgctagcggccgcccgcgatctagagtttcattccattacttttcttggcccgagatgagtgtggttacacttgagttatggctaaacaatgagaaaccatgatgcaaaggacaatataagctgtagttgtttattcactttagggcaagtcaatttataactcatgagatattggatgaagaataatagtgcagtccttag

SEQ ID NO: 2945 - DNA, 434 bp, Bos taurus
  Clone ID: 19-LIB3058-034-Q1-K1-E11
tcgggaagagctgatggaggaggttcaaaccttgtactactcagctgatcacaagctgcttgatgggaacctactagatggacaggctgaggtgtttggcagtgatgatgaccacattcagtttgtgcagaaaaagccaccacgtgagaatggccataagcagataagtagcagttccattggatgtctgtcttctccaaatgctacaatacaaagccctaagcatgagtggaaaatcgttgcttcggagaagacttcaaataacacttacttgtgcctggctgtactggacggtattttctgtgtcattttccttcatgggcgaaacagcccacagagctcaccaacaagtactccaaaactcattaaaagtttaagttttgagatgcacccagatgagctcatagagaagcccatgtctcctatgcagtatg

SEQ ID NO: 2946 - DNA, 214 bp, Bos taurus
  Clone ID: 19-LIB3058-043-Q1-K1-E11
ggagactagtgggcattagatgatcagttccttcaagtggggctctgaagcccactccaggggccccatctccgtccaagtcagagggacttaactgcatacccttcccccattccctcctgccacccactgctgctaacctttggggcattgctgcgggctttagtcactgacataaatgcaacaaataaagacaactgctgtggccttcccc

SEQ ID NO: 2947 - DNA, 436 bp, Bos taurus
  Clone ID: 19-LIB3058-044-Q1-K1-E3
ggacgacccacgcgtccgacgcactcctgggaatctttagaacattttgtaccatatacccacaccaacgtgctatgcccctaatgggccatcttacaatgctctaaatgcgcattatcactgtaaagtaaatgttgtgtttaaaaacacgcgccttcatgttgcccattgagaggttatgaccaaagaaacattaacatgttaagcaactcaggaatcttacccaatttcctaacaagacggacagaaagtctttagtcatgtacagggttggcatatgaaacacggattacatgcactcgacttgcatcggactggtcatatcagtgggacgcgaattacatgtgagaagcagatatatacctggccataactgtatgtaccctaacactctaaacattagatctatctgacaataggaatcatcaccctttca

SEQ ID NO: 2948 - DNA, 416 bp, Bos taurus
  unsure (20): Clone ID: 19-LIB3058-045-Q1-K1-E11
ctggtctctgctcgtcctgngctttccttcagggctttcctcaggagcacttccttccccctgtcctggggctcctccccagagcatcctagctacattctcaggtctcgggcacccagcttacaggaagccagtgagccacgggaagagactgggagggctcaccatggtttcctcttcctggatcacctcgggtatatatgtgcgtcgtttccgtctgtcttttccacctgtgccgtacctgccaccccttctcagagcctggagacttgttctgaaggaagtgaagggctgggcccatgcctgccgtctagcacagcaccctgccacccttcccacatcagcaggctccttgaggggacatgcaggcagtgcttaacatctgccccatcgcttaaataaaatgcgcccccttt

SEQ ID NO: 2949 - DNA, 440 bp, Bos taurus
  Clone ID: 19-LIB3058-045-Q1-K1-E3
catgttttatcatctaatggactatcaggttgtgtcccctttattgatttttaaaaactgtttatttctaggagacaaaagacctgaaggacctgaatccagatttattgcctctaatggtctcagaagagcacactcttcttgggccctagaaggaattctaagaatttgagctacatacagaccaagtactcttttctgaacatgccatggattttcatgctctatatacctttgctaatgttacttctgttggaatgcctgctcttttcctcccccatgtaagagagttcacacaacacaatgcttcaacttcagctcaaatgttaataaacctatgaaattcccagatagagttggatattcctgctctgtgaccgtattgttcataagacttctgttactgaatgatactttattgtatttctctttcacctact

SEQ ID NO: 2950 - DNA, 438 bp, Bos taurus
  Clone ID: 19-LIB3058-046-Q1-K1-E3
ggctattttagtaatgttgggacatcttacctccctttggccactaaaagaactgtaggtcctactcttcaaactctttttatagactataatagatacgtggtgtttcaattagtaagcctacatgtaaagtgtggaagaacattatctgtaaactccaggctgtgttaaggtaagtagatacatacccacattgtgacagagcaggtaactttttcttaactgagcttttatgaaactgttttattgttttaaatacataatatacatacacagcatttttctacataatgtacaagttttaaataagcatttaaaaaataaatttaggctacttgtaaaaacagttaagcaacaaccacattttataatttggaacacaaatgaaggatttaattttctacatttaaaatgaagaactaaaattctcttcttgat

SEQ ID NO: 2951 - DNA, 436 bp, Bos taurus
  Clone ID: 19-LIB3058-051-Q1-K1-E11
cggacgcgtgggggacgctggagtctagttcaagacaaaagctgtcaagaggccctggccatctgtctgtctatccgttcctccctcggtcccagagtggccagatccctggcccagtagcacaaacaggctggggtccgaggaggggtccgtgctctgccagggcctgccctctgatctctctcctaacttctctgcgtctgaagaacctgaaggatgtgccttgctcgccgctgggctgtgtcctccgtttggtggagacagtgggcagggttccacctctctctggggtgctggtgtgagggtgcccctgggttccaagggagctgtgtgcacagcgtgggtgtgtcagccgggtgacagcagtgggtgaagggcgtgcatgccatgctgtgtgtgggacaagccagggtatgccctacccttctttccgggg

SEQ ID NO: 2952 - DNA, 416 bp, Bos taurus
  Clone ID: 19-LIB3058-052-Q1-K1-E3
gtatacatatacacatacacctatgttttgaagggcctaatcagctttggaagtattgagtggtcccttatctcttaaggctaattcttagatctgttcatttaccaagtcgatccagtttgtcctttaggttaagtaaaactaaggagtaaaggcaagagtacacccgtggcgaattcatgttgatgtatggcaaaaccaatacaatattgtaattagcctccaattaaaataagtcaatttatattaaaaaaaagagtaaaggcagggagggggccagcctctaaatgccttgctgctgcaaccttggccccatatgtcccctgaatacatgtgaagtccccttctgaatgccaaacccaccattcactggtgctgactacatagaatggggttgagagaagatcagcttggac

SEQ ID NO: 2953 - DNA, 401 bp, Bos taurus
  Clone ID: 19-LIB3058-053-Q1-K1-E3
cggacgcgtggggcagttttggtgttctttgctctgtgctggaaaaatgaccatctgccaacttttaccatatttacttgtttttgacccatggaatatagcacatgcactgtgcaaatggttgaatcagcaggactacaaaaaagaaaagacaaaaaactactgaggagcttagtaactgctgtttctgtgcatagtagttaatcttccaagcacatctagtgtctgtccgtttctaattggcatgtgtgtaggctgctctgtgactgaagtgtttttcaaaccagctttacaccctttaggaaaaatcctttgtgattggacatttaatgtctgccgggaaactggtacccaagatgttgaagctgcagttattttatgatagcacactttccttatct

SEQ ID NO: 2954 - DNA, 328 bp, Bos taurus
  Clone ID: 19-LIB3058-056-Q1-K1-E3
ccccatcttacatttgtggaaaaatcatagcttacagtcttgggaaatttgggacatgaaaagttttcatggtagttcatgtagtgtatgggttgatgtaatagaaatagtctgatattatttctacaactactgaatcattctccccttcatttaaaccccttttgtttcacttaaacaagataagagtctgaatggaagatcttgtagtttccaagggattctgagaaatttttgtgttcaacatttggaaggctgtctactatttcagttgatataactgcttcctttaaaaaaaaatatagatgtggattttctgtataggtct

SEQ ID NO: 2955 - DNA, 408 bp, Bos taurus
  Clone ID: 19-LIB3058-058-Q1-K1-E3
gcaagagtgtagaattttttgctgcttatatttatgctcgcattgtcccttgtttcttcaaaggaatttagcactctgcctatgtgaagtgctttaaatgttatgagacgaaaccctgactgccaccccaggaaagtgaactgaagcttgatggaatttactaaagggtgttttgtaaagcagtggttaggaaagaacgctgctctcccagagatcccaaggctgtagcatgagaacttggagagctgctaaaatgattaaaggtttacagaatgagccctgtgaggaaagcctggaaattgctgggagaagtctgagggattcgtacttaattatatagtcttctggtgctgtgtacttattcaattatgcattctacaaatatttatttaccacctgtaaccggtg

SEQ ID NO: 2956 - DNA, 427 bp, Bos taurus
  Clone ID: 20-LIB3058-003-Q1-K1-E7
ctgagcccttgctttacttaatgtaatgtctaatcataggattttagcttgttctactgttataaacatttctatttcaaaaatgtattcaaatttgaatgatcatagttttataaataccatagagggcaatttttgctaagtattagttaacattttttcaaaaaagattttcaattaaagtcttgcaattaatcttgagtatgttcattctttttggaagcaaaatgcttcactatgtccaactgacattaacacaaactcacaaggcttaggagtgaagagaaaatttgaattaggtcaggcttaatagataaaaggtcctagaacgtagcagaatatactgcccgcagcattgtttctgtggtacatctcattgctgtttcactcgttgggaagtatgccgctgaacatgtccttctgtgag

SEQ ID NO: 2957 - DNA, 464 bp, Bos taurus
  unsure (349): Clone ID: 20-LIB3058-005-Q1-K1-E11
gcttggtttgattgaaataaatattccctggatgtctcgtcagggactctgctgacagccccagagatgccgcctcctttcagtagatttcatctgagccttatcgacagctcaccatcttcagttcccttctaaaaacatgaaagtccttgggacggtcccaaagacaaggcctgcacatttatataatggcaaagcattttttaaaagggtcgggttgaaatagctaggaatgatcctgtaaagaagagggaccattaatgtgagcggagataaactaggtcattaccacacctgaagcagcaatagatgtatacagtgtaaatttgaaatccaccctttagtttanaaaaaaaggagcctgcgaagtccatttatctgtttccagtcccgtcagtcacccatccaatatgttggcagaatatcgtctgagcagtgtgtgtaaggagtaatcatgaaagcaa

SEQ ID NO: 2958 - DNA, 366 bp, Bos taurus
  Clone ID: 20-LIB3058-006-Q1-K1-E7
acaagaacctgcagcgcggacttccggctgcgcatgcgcctgccgccccaggcgcgtccgcgtgtatccgtgtctgcgtggggccccggaccttccctggccatcagccgggcctgggacctgatccaggtccgaggagttcgctgcggaggcctagcttcccggcgcgcgtgtgcaggggcggggcgcccgacccctgcctttctcctttggggtggtctgacctagcatgattgggactgatgccgaggggagacaggccctggtcccaagctgctgctatatcttggctgtttgcgttgagttgctagcctgttcacggatcttagggattaccgtcttaatagttgcgcgatccttactttt

SEQ ID NO: 2959 - DNA, 215 bp, Bos taurus
  Clone ID: 20-LIB3058-008-Q1-K1-E11
atcgcgagcggccggccttctattattttgccttatccagtatttattgctgttttttgggtagcggaaaactatttatacccacatgcttacagctgcctgaaacctaatctctcgaacaggcttcagctggtcaacgacaggctgacttttgcgaacatattgaaagaccaggaggaccattcatgaactggtctctccacaggattgattgg

SEQ ID NO: 2960 - DNA, 438 bp, Bos taurus
  unsure (325),(425): unsure at all n locations; Clone ID: 20-LIB3058-009-Q1-K1-E7
gaccatttggagaaaaactcatccgtggaaacagcgaccgaagtcttgaacacaacagctgagagaatgaccccagcgacaccgtctcctgtcacgctgaccagagggacttggggaggcgaccacacctctcttgcagtcacagcaggggcaacacacaggacagacgtgggcacttctgcgacggctggagggacccgggccggagccgcctccaggccgcccgtgccgcccaccccggcatctgcctggaggaccccgtccgtacctggcacgcgagcgcccggcaacggcacgtcatctaggccaacgacggccatgccgnccaccacacgcacaccggccacaagtgcccagcccgctgccgggacccccacaaatgtcagcggccccgcaggctcacacggtcttcccgggcccaccgncagcctgacgccc

SEQ ID NO: 2961 - DNA, 415 bp, Bos taurus
  Clone ID: 20-LIB3058-010-Q1-K1-E7
ctggaaaaatctgcttatcctgggcttcaccaactttattgcccatgccattcgccactgctaccagcctgtgggaggaggagggagcccatcggacttctacctgtgctccctgctggccagcggcacagcggccctggcctgtgtcttcctgggggtcaccgtggaccgatttggccgccggggcatcctgcttctctcgatgacactcactggcattgcatccctggccctgctgggcctgtgggattatctgaacgaggctgccatcaccaccttctctgtccttgggcttttctcctcccaagctgccggcatccttagcaccctccttgctgccgaagtcatccctaccacggtccggggccgaggcctgggcctcatcatggcactgggggcgctcggcgggctgagt

SEQ ID NO: 2962 - DNA, 404 bp, Bos taurus
  unsure (342): Clone ID: 20-LIB3058-012-Q1-K1-E7
tttttaatttagagaaacttctatacccattttttaagaagccattccaatgaattcgtctaattggccccaaaatacaacaaatagcactttctgatgagaccaaagggaagtcaggaaagcctgtttatggaccacccctcagcggccaggtgagcctgagctcctccccatcgtcccacatactccctggccctgcatggagtccctgcagggggtgggcggtggggaggaagctctgactcgggagggcccctgggggcccctgcccacccctgcccggtcctgactcacccccagctgatgcacggtgggttctgagaatgcgggatgctccagctnctgctaagaatcctccacaaactgaatcagatcaaatgaagagtgcaggtggtgggtggggg

SEQ ID NO: 2963 - DNA, 286 bp, Bos taurus
  Clone ID: 20-LIB3058-014-Q1-K1-E11
aatacaaccgcctcgacgctaaccattgtctaaattcccaagtgcagcaggcgggcccccaccctgcccacatgctcgtcctgcaggctcctggccagcggctcaatggagaagacggttcagctgtcagctcacccttgaagatcagcgaggtccctgagggtccagggtgggcgaccctccacgcccaccttctgccctgggacggccttggacgcggccctggggaccctgcctacgggccctcatgcatagtgtgtagaccggcctgtggctctgagcttcc

SEQ ID NO: 2964 - DNA, 453 bp, Bos taurus
  Clone ID: 20-LIB3058-015-Q1-K1-E7
ctttcattacttcccagatattttagagataaatatttatgaagaaggtatttttgaagtctccttttgtctgacagaatttcagagatatttaaaattagcatccagaatccacaggtcatgggctaaccacatttagaatactatggcataaacctgtcgtcataattaccaaataagacagttgggatccatacccaagttttgagcaatgtttgtctcaaaaagctgttatccagtgatgcaggaaaatacagtttgtgttttcctaaacaaactctggtatttttaaatgtgctttattgtttgatttggtcctgcctaaattcaatgagctaggccaataaaggctgaaccaaggagatttcattctttggtatcatgtgtagatatcatgtatagaaaataaattaaaatatggctctaaattctgtgttgctgttaatcctggtt

SEQ ID NO: 2965 - DNA, 283 bp, Bos taurus
  Clone ID: 20-LIB3058-017-Q1-K1-E11
ttgttttcattatggcaggtttagcaaatcctcaaaaagaaaaactgatgtgcttgcctaaaactataatgcccacctaaccttctttattcagtgtcttttacaatttgccctggaagatactattcatgtaaaatgggcaccttctctctctcttccagcatgttgctttttgaaagtatcatgggatagtggaaagaacacagggttagcagtcaggatatctgggttctggttccattcaattctagacagaactgaccggtagctttgggtgagtcac

SEQ ID NO: 2966 - DNA, 397 bp, Bos taurus
  Clone ID: 20-LIB3058-019-Q1-K1-E7
gcgcagactccagtcaatggaccttgtgcctagagagcatggctcggcgaatgctccaggaggctgggtgactgaaccatgcatgccaggccgcgggtgctttacaattatttgtgtagtttggagcaagggtactaacctgataccacgttcgttgtgccgcactggtgttagggtcactaataagatgccatgaaaggggagcactagagggtctgaagttttacgactataatgcctttgtcaaatactcacgtagagaatcatgacattggctggaagttaagagcctataggatcctgagggatggttgcgttaggatagagagcattgggacaggcactgaaggtcttgcctggatgcccacatagaacatttgcgctgtgctctgtcatt

SEQ ID NO: 2967 - DNA, 321 bp, Bos taurus
  Clone ID: 20-LIB3058-020-Q1-K1-E7
ggatcctcgtctctccctggggctcctccctcctgtttcacagggagggcctggtctctgcattgcagaccagcttccagaggaggagcagcgcaggcgggagggatggggcgtgcggcggggagcccagagttgggggactcctctctctggccccgtatccacacaggacctggtgtcctgcctcatcggccccacagcccatctcttctgtgccttagtcacatatgaaagccccctaccctgccactgcccctgcccctggctgtcagtctggcccagacactccctggggggctccctgttaagctgctggcactc

SEQ ID NO: 2968 - DNA, 432 bp, Bos taurus
  Clone ID: 20-LIB3058-022-Q1-K1-E11
gtccgtgccacagatctgttggtgacattgttcatatagtcaaaggggacaagttggagactgtcaatttttactttttgttgttgttgttgttgcaattctttcttcaatggttgtaagtagttttttttttttttttttaataataaaagggttcactagttaagactctttagaaatatctgtgtgttgcaattcaaatgtatgttgagattgtgaaaaggcttcagtggcactagcctaccagcacgccagccctagcctctgataacttttattgcatgatcattaccggtaataaatggtggcctatgtactcagaatacagtgtgagctggtgacactaaagccgttcttgtattactgtatttttgacagaatggttttgaaaactgctacagggactgatgtggcaaatatatctttttatgc

SEQ ID NO: 2969 - DNA, 410 bp, Bos taurus
  unsure (345): Clone ID: 20-LIB3058-023-Q1-K1-E7
gctgggacccccaggcagggcagggaggacgtcgctgctccccagaaaccatgctccccagactttcctctccggcccctcctccacactgccctgtgcgggcagtgggagaggggcctcccggcctgtgtctacccccaggtaacgaagctcccagctgccagatagatggatgctgagactccccgtggggtgttcagggccccccctgcaggagggcccccctggggcttcagggggggagcaggggcagcccacacacctggccaagcgtgttgaagagtgacaggtgtgtcctggccgtgagcttgtccggaggcctcagcgctccggctccccagcccnctccccgggcctcctggggcccctggggggggggggaatcccagctgccttcctgcctctgagcc

SEQ ID NO: 2970 - DNA, 427 bp, Bos taurus
  Clone ID: 20-LIB3058-025-Q1-K1-E7
tgtgaatggagttaactggaaaatatatatgaatccaactactgaatataaatggtattataataaaagtgtgtcgtctatgtgctaaatgtcaatatctaccaatgcatatataacctatagttgatacactgattgattcacactttgatcgtggctggatttttgttcctatctataaaaaaaatcttcaaattatctgaaatgcaaaatgtctgcttttgtgacagaaaatacacttagaatacaatgccacccactgttatctcattcatgtggtctgttcagctgatttacatatttaaagcatatgggaatgttagtcaaacattggtttgtctggtatttatgtcagtctacagagggttcgcaaatttaaaagctcttttaatgtaatgaaaaagatgtgagaatattattgatggta

SEQ ID NO: 2971 - DNA, 419 bp, Bos taurus
  Clone ID: 20-LIB3058-026-Q1-K1-E11
gtccctgaaagccactgtggggagtttgtgccgagagccgctccccagctcggcgttcatcctgaatctgccgggcctcctgcctcggtccccaggcctggtctcctccctgcttccggtgatgccgtggcaggcaggggttggaccacacacattcctcgggaagcaggggcgtgcctccccaccctggaaggtgttttcaatcctgtgtctactttttagagattcttttaaacttttctgagagtgcttacgtacagattttcttgtacacactgtgagatttctgcgggagggcttgtgctgtgaagtgggaccattctgtgctgcccaagtggccatctagagagctgggtggctctgctcagagggtctggcacttggtgggccgggaaggcactgctgctgctctggcttct

SEQ ID NO: 2972 - DNA, 325 bp, Bos taurus
  Clone ID: 20-LIB3058-027-Q1-K1-E7
ggcatgacgccctctgccaagcaggtaatcctgccccactggggtgggatggagcctggccagcacctctgtccccaggcccaaggaaccgcttgcaaacttaacttccaacaacccttggaacattcctaccagggcctaactttcttggaggtaaaaccaaggcctaataacgggcctaaaaccctggccgaatttggttggggtttccaagttaatgatccaaaatgtctttttaggccacaagggtaaacctggttccatttccagggtgcacattgcccacgaggaggatctgttttggggcgggcctgggggccacaca

SEQ ID NO: 2973 - DNA, 403 bp, Bos taurus
  Clone ID: 20-LIB3058-030-Q1-K1-E11
gtaggtgtatagaagctgtgactctaagcccactaaagctgcactagcgtttaagtcatttttcagcccacgatgacgttagtaatcattaaaaatctctggtatcccgagtcactgtcagttataatcgaattggagcaatgagcctgagctctgcattcacttgagctataaatcataaacccatcaccctcctgagcagaggcagagagaaatcagtgagtaccctaataaggtccatatgtcgttgtaaagaaagtcttaaaaaataattaggcttacagatcaccatacttttgtagcaaaaatgtacatatgtgaccaagaagtgagagaactgacaacgtcagtgtttggcttctgttttctgccattttttaaaaagagtggaataattgtttac

SEQ ID NO: 2974 - DNA, 357 bp, Bos taurus
  Clone ID: 20-LIB3058-030-Q1-K1-E7
tttgattccattggggagggtcagggaagaacaaagccttgacattgcagtgcagtttcacagatctttatttttagcaacgcagtgtctgaggaaaaatgacctgtcttgactgccctgtgttcatcatcttaagtattgtaagctgctatgtatggatttaaatcgtaatcatatttgtttttcctgtatgaggcactggtgaataaacaaagatctgagaaagctgtatattacactttgtcgcaggtagtcttgctgtatttggggaattgcatagaaagtggagctgacagatataacccttttcacagtttgtgcactgtgtacggtctgtgtaggttgatgcaaattttc

SEQ ID NO: 2975 - DNA, 255 bp, Bos taurus
  Clone ID: 20-LIB3058-031-Q1-K1-E7
attgaagtctttttaatatgccatgatatgggaaaggctatttacacattcatttatgtagtagctttttattcagcacttagtatgtgcttggcactattttaggtgctggagttacagtgatacaccaattagacaaaatgtcagtatttgtagagctcacattccattggtaaccgtgtatcatctctagttttcacaactctgtaatacagataacagtttcaccatttcacaggtgagaaaaatgatgct

SEQ ID NO: 2976 - DNA, 402 bp, Bos taurus
  Clone ID: 20-LIB3058-034-Q1-K1-E7
agggaaccatgcgggtaccaggactaccgtgaaagagaatgaagtgggctggaacgactgcgacctgaccatcaccgagaaccctagggagacatacgacgaccagcatagcagatgaggaggacgaggaggaggaggaagaggacagtgaggatggggactaggaggacgacatcaccgacgctgactcctagagcatggaatatgacgacggggagcatggtgacgcgaacaccgctaaccggcagaaaccgctggagtacgacgacttcacgataagatactgagcgcaccgtctgtagaccagcgcggatcactcgtcagacgtgctgattgcggagactctgctgacatcgttgatccactacagtgtgcatgatgctcaaagtcattctggccagt

SEQ ID NO: 2977 - DNA, 432 bp, Bos taurus
  Clone ID: 20-LIB3058-036-Q1-K1-E7
ccgcatggtaaatgtcacgactccatatttatctgccgcaaagaaaatgcatgtggaaaatccatccatccctctcttgcctcccttctgagcttctgagcactgtttttttttgttctgaaatttataaccaatataatgctgaagatttgccatactgttatttgccatactgttatagaaacattgaacggtaggactcctagaaaatttgcaaagagacattattcaccatatcagactctcaggttctagtgatgaaaactttgcttatactttgctgttacttatacctgctgctgtacggaaaataaaagtttattcatgccacatttaactttgaccataaataaaagggagcatctttttggagttagtcatggtcatatttagtggtatttctcaacagttcttaatttgaaatactttaaa

SEQ ID NO: 2978 - DNA, 283 bp, Bos taurus
  Clone ID: 20-LIB3058-038-Q1-K1-E7
tcttcctcttactcttgggatctcgagtcttttcctattatttttttatttttaaatttttgggagggttttatataatcattggcgcttcaaatacaatctaattaaacctacatctaagtttcaaccataatactcgctacatctaaaatgagtacaaaaacactatttttaccataaattaatctatataaccttccattttcaaaactaaactgattttaataaaatccgatatgatctaaaagttgaaaaaacataaacatctctcataatatttctt

SEQ ID NO: 2979 - DNA, 388 bp, Bos taurus
  Clone ID: 20-LIB3058-040-Q1-K1-E7
tcatgcgctgtaattcatacattcatcttttgatctttgcccttctcataacttattctgggaggatctcaggctgtttttgtgggcgatcttgtccatgaatacatcaggaatacaccttcagacacagaagtgcatgcagaacaccagctgagaagcagacaggagtacctaaccaaaggaaaagaatatatggaactacacaaaactcggtaggatgaaggaactagagggaaaagaaggagtgttagtatgactgcaccagggtgggggaattgaagcagaggtttgatccccatatctgggcaataagtctgagtcataggagaaatgtttaaagcctgagtgaaacaacttgatctgtggcagcctaaattgaatgaaaatc

SEQ ID NO: 2980 - DNA, 429 bp, Bos taurus
  Clone ID: 20-LIB3058-041-Q1-K1-E11
gtccggcagaagcagcaggggcgcaaattgggttgggctggggcgggaacgaaccaggccctggaggcgggaaacgggcgtggcctgggctctaacagaaactagcgaggaggggcgcgcgaagccgcgagagagcgagaacacagagggttggcataggtcgaccgaggcgcagcgagcgcctagccgactggggcgggaaagcgcacgcggcaaaatcccgccaccgcccgacgcgtgtgcgcgtgcgctggagtcagacactcggtcttgaatacctggggctgcgcactgggagcaacggtcccttgggaattgtagcccctcgttctctggttgcccgccagcggttctcttttggcgaactcatccggggcggggaggaagcggaagagagggaccaggattgtcgcggctcttcgaccactg

SEQ ID NO: 2981 - DNA, 451 bp, Bos taurus
  Clone ID: 20-LIB3058-044-Q1-K1-E11
ccgggccgacccactcgtccgcagagtttgtaggggttcacctttttgtttatctattgtctgacctcctaaaagtatagacagcccctcatcattttctgatacagggcctgaattgtcacactctgtctttctgtatcttttatcaccatttcctgcttgaaaacgccagttctctggctttattttgtgtgcacctttgcctgatcgatattctcttgatatgtccttcactctcctgttgtttgcaaataatgattccagctgcttcatcctatgctttctagttgaggatgtgttcctgatgtgaggaatccaaggagcagagaatttttgtgacttgcccatggtcagtacatacagttcctcctttagtttagaatccagctctgcagaaagcaatggcaccccattccaatactcttgcctggaaaatcccatggatggagga

SEQ ID NO: 2982 - DNA, 415 bp, Bos taurus
  unsure (355): Clone ID: 20-LIB3058-046-Q1-K1-E11
aataaagtgagctgaccggacaaggactgcgtgtggggacagggtagacggtacagggtgtgtccaagagtgcctgagggacagagggcccctcggtggcctgatggcccgtgggaggaggaggagggcctgcacggctcctgggggccagggggcggggtcggtgttctctgcagcatccagagcaaaaccacaatgcgctgggaaggggccggaggctgggtctcccacccgtttgctgcaggccaagggggggagggctgctgggggagattggccctgactgttgtcagaggcgatgccatcccagggtggtcccgggtggcaggactgtagtggagggagtgcacccctncacccgcacagcacgttgcgccaactctaaacaggtaaaagcacgtgtgccaagggcaag

SEQ ID NO: 2983 - DNA, 414 bp, Bos taurus
  Clone ID: 20-LIB3058-047-Q1-K1-E7
cacatgctcgtcctgcaggctcttggcttgcggctcaatggagaagacggtgcagctggcagctcacccttgaagatcagcgaggtccctgagggtccagggtgggcgaccctccacgcccaccttctgccctgggacggccttggacgcggccctggggaccctgccgccgggcccccatgcagagtgtggagaccggcctgtggctctgagcttcctttggtttctttcccgcctcctctcacctcttaaagcacttcctttcctaaccgatcacagtggagcggcttcgcggcgggagctttggtacgtggcaggcgggcgggcagctgggagtgtcccgtgtggtggccgcggctcacaccccggaggagccggatcggcgcgtgcggagaagggacgcggtgcggactc

SEQ ID NO: 2984 - DNA, 409 bp, Bos taurus
  Clone ID: 20-LIB3058-050-Q1-K1-E7
cgcgtcttccccgctggaggactctgctcatcctggtctcagagtgtgactgcctgctggctcctctctatggaagggcatcagggtgctcacgcctgggtctgcaagacagggttgtcgccctctttccctggctcaggtcagaccaggcttcatcctggagacaagcgaggtggccggagaggcccctggagtggcacaaggggtaagatgggtacttaaggagcttcacggagagctccacagaaagaggtgcccgggagccagctgtgtgtataggctttgtgaaggcaggacaatgaaggaaaatgaagagggaaaagagatgggtcagatagcttcccccagtcctaggaagcctcatgccttcagatggggtccaccctgctctgacccccagactcccacc

SEQ ID NO: 2985 - DNA, 406 bp, Bos taurus
  unsure (371),(388): unsure at all n locations; Clone ID: 21-LIB3058-006-Q1-K1-F1
gctaattaaaaaatacttgtatgttgtctgatcccagaacttttatctaccaagaattacagataagtaaccacagggcggggaagctagtaattgctttaagtaatattctattttggttatcaaagaagcaattccatgctaagcattatttctagacctataaaaactgttagctgtttttacagtgaggtatggtgaaggagttgaagtgaaagatgacaatcagctagattttattttcagaatgtaaataacatttagaaaatgatcaaacagcattaaccatacatctgcctttgcatctgaatactgcactaatcaagtaattctttcattacctttttaatagttgtgcaatccttactttntactttgaacaactctnttcctaaaagtcaactat

SEQ ID NO: 2986 - DNA, 294 bp, Bos taurus
  Clone ID: 21-LIB3058-006-Q1-K1-F9
ggagccttgaggggcccctgggtgccgggcagaggcacaagtgggctgtgacagatggggcaagggtacggggctcaaagcagctgactgagtgccccagggccaaacagctaaccaggggcagagccaggatccgaagtcaggagctacttggagatgctgctgctgctgctgaccctgttgctgctgctgccactggccatgctcctgtggcggccgcagtcccgggatgccaggcggtcctggcttggccggcttcagcactgggtgacgtggggggccctgggcttggca

SEQ ID NO: 2987 - DNA, 379 bp, Bos taurus
  Clone ID: 21-LIB3058-007-Q1-K1-F9
cacaagtacctcggcaagttggaaagcaagatagactgagggcagaacacaggttccaccacttaccaaagaagagtttcggttaattcatctctaaacagggctaataaagcctactttgctgtggggttgtaagttctgagatcacgactgagaagcattgtggtgggtggtggtgaaactaatgcaaagaaaaaactgcatttaactaaactgaaatataactctgacaaactttttttttaatcagtagtaattatactcagtggcatgtccacttagatataatttccagattttttagttaactttaagaccagtactaatattggattatttaataaataatctttgaatacttaaattctatatgaaatag

SEQ ID NO: 2988 - DNA, 403 bp, Bos taurus
  Clone ID: 21-LIB3058-008-Q1-K1-F1
tgtgttttaaaaaatgagcttaagcagactaccttttaataggttgtaatgttaatattggctgatttcagaccagaagattcaagtctcctattcatgtgatttttcgtttcattattttttctccccagtagatttgtaagtgcttgttttccatctttcaaagacacaatgatttttgaaaatcagttacaaaacccttgctaacatcagccaagacttcttaacccctgaagtcgaggctccctcatcatcatcccacccccgggtctggagcagactgttttgaataccttactgttctcgttagtgacctttgtctgcctctctgagttagacaacaggcgtttgggtatctgtctggcacacagcggcagctgagggaaacagtcaccatcattcc

SEQ ID NO: 2989 - DNA, 430 bp, Bos taurus
  Clone ID: 21-LIB3058-009-Q1-K1-F1
atgcgtgggacccattggaagcactgctcatccgtcttaaacagcgaccgaagtcttgaacacaacaggtgagagaatgaccccagggacaccgtctcctgtcacgctgaccagagggacttggggaggcgaccacacctctcttgcagtcacagcaggggcaacacacaggacagacgtgggcacttctgcgacggctggagggacccgggccggagccgcctccaggccgcccgtgccgcccaccccggcatctgcctggaggaccccgtccgtacctggcacgcgagcgcccggcaacggcacgtcatctaggccaacgacggccatgccgtccaccacacgcacaccggccacaagtgcccagcccgctgtcgggacccccacaaatgtcagcggccccgtcagctcacacggtctttccgggccc

SEQ ID NO: 2990 - DNA, 358 bp, Bos taurus
  Clone ID: 21-LIB3058-010-Q1-K1-F9
atgactcacaagcttgactcagtattcacaggaggttttgggagaacatgatagctcttccgccgggtgtgcacgaacggacttgacttccgcggcttcctcgagctcgctcggtgtggcgaatctgccgttgcggcacggtggctgggcgcgcaaggcccgacgggaagcttgtggaatctgctgcgggaagaagaacgccaggtttcctgggcagccacagtcatggcagcgaccgcccccaaggctgggggatccgcacctgaggcggcggcttccgccgaagctccgctgcagtacagccttcttctgcagtacttggtgggcgacaagcgtcagccccggctcctggagcctg

SEQ ID NO: 2991 - DNA, 429 bp, Bos taurus
  unsure (14)...(15): unsure at all n locations; Clone ID: 21-LIB3058-012-Q1-K1-F1
tttgattccattgnngagggtcagggaagaacaaagccttgacattgcagtgcagtttcacagatctttatttttagcaacgcagtgtctgaggaaaaatgacctgtcttgactgccctgtgttcatcatcttaagtattgtaagctgctatgtatggatttaaatcgtaatcatatttgtttttcctgtatgaggcactggtgaataaacaaagatctgagaaagctgtatattacactttgtcgcaggtagtcttgctgtatttggggaattgcaaagaaagtggagctgacagaaataacccttttcacagtttgtgcactgtgtacggtctgtgtaggttgatgcagattttctgaaatgaaatgtttagacgagatcatgccaccaaagcaagagtgaaaaagcttgcctttcctggtatgttc

SEQ ID NO: 2992 - DNA, 222 bp, Bos taurus
  Clone ID: 21-LIB3058-013-Q1-K1-F9
tgcctccctccagccccttccgagacactgcgcatcatgcccccctccacccccacccacactggcaggaggaacagacagggagaccacacacagagctcgttgtttataaatctctgcctggctcatcggtctgtttgtccatgtatatatctgtatatctctatggaaggggaaagggggactcgtgtaaaaatccaaaatacaattctatgaacacct

SEQ ID NO: 2993 - DNA, 404 bp, Bos taurus
  unsure (375): Clone ID: 21-LIB3058-015-Q1-K1-F1
cgcggcgggagctttggtacgtggcaggcgggcgggcagctgggagtgtcccgtgtggtggccgcggctcacaccccggaggagccggatcggcgcgtgcggagaagggacgcggggcggactcggccgggcctcggggggtcccgcgacggcgcaggcgcgcggggaccgcagctgcccccgcgacgacctactttctacggagcccggccggagggcggaggcggcgcagctcagagcggtggcaggacgttccgggagcctcgcggtggccgtggctatcgcgagagcgaaggtgacaggtggcgtgctcggcacgccggtgcgcacagcgaacactaacccctggggagagataaccaccccacctgcttnctcccagaaacccactgaccagtacactc

SEQ ID NO: 2994 - DNA, 278 bp, Bos taurus
  Clone ID: 21-LIB3058-015-Q1-K1-F9
gcaatttatttggaaaaaaggtatgttcaagatgctcattcttaaagtttgctccactgtgagaagacatgccccccccctccctgcacgtgaagcaggttgtagaaagtggcattcttgggcaagtaggaagactttatcccatctctttaccttttttatcccatctttatagactctctctctctctctctgtctctctctttttgaggcatttgtttgaaaaaaaaattaattgttgagatgcccaagaacctgggataattctttactttttg

SEQ ID NO: 2995 - DNA, 258 bp, Bos taurus
  Clone ID: 21-LIB3058-017-Q1-K1-F1
aaaaaaaaaaaatgatgctcttcagtatgtttatctctgtgtgtattagctagctatatctgaaaaagatggttcatttgttcgtgaggttagaaagagtaggaagcaatggaagattccagcccatcttctgcattgctttagaagtgcgtatttgtgcatctagagaggaaatacatgatcgctcctttgtctcagaaagagttaagcaccagatagattgcctgtatgattatagggaggtattcataagaaata

SEQ ID NO: 2996 - DNA, 460 bp, Bos taurus
  Clone ID: 21-LIB3058-019-Q1-K1-F1
gttgttttgaatcctgtgaatgtggcttgatggtaagattcctctggcagctggcagtcggggggctggggacacgggagcccctgccggcagccgtggactctgcgagtccccggctcctctcacccgatggtccccgtctcagtttgcttttgttttaaggaggatatcctggagtaaattttaggttaccatagcgactttgttttagaggaattttgtttaaaagaaaatagtaccattctgaactttgcgatgacccccttatgacattttctgaaaatgaaaaccatcagctatgcgaaaagatttttcaatgaagatgtcaacgtttgtgaaaaaaccagaagttattagatgaaagcagtcattgaatctttccaatgtacttgatcatgcacaatgagtatttttctctcttaaactggaaataaatctatgtctgttagaagcagtatag

SEQ ID NO: 2997 - DNA, 316 bp, Bos taurus
  Clone ID: 21-LIB3058-020-Q1-K1-F1
ctttcctaaccgatcacagtggagcggcttcgcggcgggagctttggtacgtggcaggcgggcgggcagctgggagtgtcccgtgtggtggccgcggctcacaccccggaggagccggatcggcgcgtgcggagaagggacgcggggcggactcggccgggcctcggggggtcccgcgacggcgcaggcgcgcggggaccgcagctgcccccgcgacgacctactttctacggagcccggccggagggcggaggcggcgcagctcagagcggtggcaggacgttccgggagcctcgcggtggccgtggctatcgcg

SEQ ID NO: 2998 - DNA, 243 bp, Bos taurus
  Clone ID: 21-LIB3058-021-Q1-K1-F1
cgcgagtggccgcccttttttttttttttttcatggtttaatttttattgctctcaaagggcttggtatgcaaatgcacaagctaatcttggttaaatcaaaaggaagtcactgatatttaaaacctacacttggtcttaataatccattcacccagtagtctaacaaactgcacactgacttaaattataaattacattttgtcatataattattaatccatacattatataaaagtttaat

SEQ ID NO: 2999 - DNA, 175 bp, Bos taurus
  Clone ID: 21-LIB3058-023-Q1-K1-F1
gcgagcggccgccctttttttttttttttttttttttttttttttttttttttttttgggttttgtttttacattaggtggaagtaaattatttaatttttgaattctggaattttgaacatttactggaatttgtaatataactgctgggaaatacttgaataaagatgaccag

SEQ ID NO: 3000 - DNA, 265 bp, Bos taurus
  Clone ID: 21-LIB3058-024-Q1-K1-F1
gacatgagctcacgaatactatgtttccagttacgatcttacgttttgaaataggggatcgtaaacgtgacagaggattagaatcacaccttgtaaccttactcatacacatagtcctcaaaaaccaaatcttcttaaagaagttcttacaatacctagaattgtattactagaccatgcctaattcttttaaagatcgctgtttactgctcacactgcataaccctgacttctaataagtaatatattgattattcatcaataa

SEQ ID NO: 3001 - DNA, 441 bp, Bos taurus
  Clone ID: 21-LIB3058-025-Q1-K1-F1
ggagcataccaatgcacttactgtcaatgtgcatacctcattttgagttatagtgtgcatatggttacttggcataagccttactggatttatatgtaatggttgactttttaaaattttgggcatggcaaaagaaactttgatggcagattgtctgtatacaaaatcaagtccaagtgaagtggatgaagcagactgtgctggcaactgtggttttccatgtgccattattcattaaagtaaacaaaccattctgctttcagcatattgaagaaataagttggtttacacttaattattggatgaacgtataaagcgtttgctatgatgactagcaatattgatactcatatacttcatctggtacaagatattattgcatagacttcattgatagctttgcatgggtacgacattcagagaattatctgggccatttaa

SEQ ID NO: 3002 - DNA, 308 bp, Bos taurus
  Clone ID: 21-LIB3058-026-Q1-K1-F1
cggctcgacccacgcgttcgtggccacggctcatggagaatctgtgcatctgtcagctcacccttgaagatcagcgaggtccctgagggtccagggtgggcgaccctccacgcccaccttctgccctgggacggccttggacgcggccctggggaccctgccgccgggcccccatgcagagtgtggagaccggcctgtggctctgagcttcctttggtttctttcccgcctcctctcacctcttaaagcacttcctttcctaaccgatcacagtggagcggcttcgcggcgggagctttggtacgtgg

SEQ ID NO: 3003 - DNA, 215 bp, Bos taurus
  Clone ID: 21-LIB3058-027-Q1-K1-F1
cggacgcgtgggttcatatgatatcacttgtatgtggaatccaattttttaaatgagacagaatgaacttatttacgggaacagaaacagacttatagatatcaaacacacaaacaaacttaacggataccaaatgggaaacttgggagagggaggaataaatcaggtccttgggatgaatatatactcactactatatatatgatagataacta

SEQ ID NO: 3004 - DNA, 300 bp, Bos taurus
  Clone ID: 21-LIB3058-028-Q1-K1-F1
cccggggggacccacgcgtccgaaaaatactacacagccattgaaactgtcatggaacttacccataatttattcttttgcaatgctttattgtaggattggtatgatacgaaaacattgaaacagttttacagttacctcacatatgtccaccacctagattctgccattagcattttataatcttcctttatcccttatttatccatctttccatccattacatgttttaaaggcaaaaagttgtgtctcacaactgcattgtttaattcttttaagcgtatttgcgtatgcatagta

SEQ ID NO: 3005 - DNA, 181 bp, Bos taurus
  Clone ID: 21-LIB3058-029-Q1-K1-F1
tcctcctctggaaatggaaaagtacctgtattaggagctaagtgacagaatgaattaggaaacgggactccatatagatacttaacacttcacgagatgtatttatcttggaactaataaggacttacccgacattgcactcattctggcctacacttgctcatacaaatcatttaaccaa

SEQ ID NO: 3006 - DNA, 293 bp, Bos taurus
  Clone ID: 21-LIB3058-029-Q1-K1-F9
ccgacgcgtgcgaaaagagtatagaagctgagactctaagcccactaaagctgcactagggtataaatcggttgtcagcccacgatgaccctagttatcattcacaatctttggaatccctagtcactgtctggtataatctaattggaacaatgtgcccgagctttgaatacacttgaactgtaaatcatatacccatcaccctcctgagcagacgccgagagatatcagcttagtccctaataaggtccatatatcaggcccaagcaagtcgtccttactaacaatgctta

SEQ ID NO: 3007 - DNA, 321 bp, Bos taurus
  Clone ID: 21-LIB3058-031-Q1-K1-F1
aaccaaagtgcgcatgggagttacatggtctgctcaacatcaaaacgctaacaggtggcagagcacaacggaagtcgggacctctgtgactctccctaatccgctctccaccgtgatcgcagttttcaaatcgtgctttgtagttctgcagggacatttcagcaattccatgttgaaattgtattttacactctttaaatctctattagataacaggtagacagacacaagtgtgctgatatccagattttaacatacctgtgttcatttgccagcatgctcactgttgtttccagattgactcatttagtgcataccttg

SEQ ID NO: 3008 - DNA, 255 bp, Bos taurus
  Clone ID: 21-LIB3058-033-Q1-K1-F9
gtcgactccacgcgttcgctctcagaggggtcacttcctggttgcatttgagagccagctatgcatataaatggaatggtctctcatacatgaagtatttgggaaacttggggtgttactgttactggcttaagcacttgtgatttatagctggaatgaactcattcataaggcaatataagagggcgcaatgattgccctgcccaagaagggcttccagcgggcccttctgccttgagcctgttgcttctgtct

SEQ ID NO: 3009 - DNA, 271 bp, Bos taurus
  unsure (21)...(22): unsure at all n locations; Clone ID: 21-LIB3058-037-Q1-K1-F9
cggccgcccttttttttttcnntaataataacaatttagcatggtagttataaaaagaaatagaaaatggacttgggacaaaagaagaaaattatatttttcactacagaatgagagaagttcagaaacagagttcaagttaacactaattctcatggtggtgttttaccactttttatccttcataacccacatgacaattaacttttacatgtgactcatagacacacacacccccacgggtgtgcccaacataagtcataattgccac

SEQ ID NO: 3010 - DNA, 290 bp, Bos taurus
  Clone ID: 21-LIB3058-039-Q1-K1-F1
ggtttgtcaaggtttcttggttagggattcttgtgtcggtgttctggtaggtggagctggatatcttctctctggagtgcaatgaagtgtccagtaatgagttatgagatgtctatggttttggggtgactttgggcagcctgtatattcgagctcagggctgtgttcctgtgttgctggagaatttgcttggtatgtcttgccctggaacttgttggcccttgtgtggtgcttggtttcagtgtaggtatggaggcatttgatgagctcctgtcaattaatgttccctg

SEQ ID NO: 3011 - DNA, 380 bp, Bos taurus
  Clone ID: 21-LIB3058-041-Q1-K1-F1
cgggccgacccactcgtccggcagataaatgtgtgttttctctctaggtagaaatagccattctggttacggggaaccgaaatgtgagactaagtagtctggttagaaataaggatctccttttgagtgggcgtggggatgggagaggctgtgctggaagagttggctgtttggggctgatattccctcacgaccacttgagggcttctctctgccctgcttgcccttctgggaggctgacgttggttggttaacaggtggaagcccatgatagcagtagccatcacctgagccccaggtttaaaagacacacatgtacttggacacacaggggtttggaaatatgagttggctggtcaacttgagcatgttactgacaa

SEQ ID NO: 3012 - DNA, 330 bp, Bos taurus
  Clone ID: 21-LIB3058-042-Q1-K1-F1
tcccggtcgcccacgcgtccgcgcgacgtgcaactgatgtacattgttacaatgctgataacctacatgtaagttcattagaagaaaccatactagctgtaaagcacataatgacgtatgggtaggtgaatatgtattaaataatgtcgactttctaattagcatctgcctaaaatctatacacaatattcattagtggttgagggaagaataaatggaatcataatttgtcacctgactgtaggttgattcttgaacttaacattttaattttaagaaaggccaaaaatgtgtgagacatgatttttgatacacattcttgcattatat

SEQ ID NO: 3013 - DNA, 444 bp, Bos taurus
  unsure (34): Clone ID: 21-LIB3058-045-Q1-K1-F9
cccgacggtcgcaggcgtggctggatctcggcgntcacctttctccttgcctttgcttgccccaaagaaggctgtacggcgagcggcgagcatacccgtggagcctcaatgtaagccatttctcaactaccgcctctgcgttctccagacgtgcgcgcaccctagagtactagactcgctcatgatacatcacacaacttatacactgcgcttaatctgcgcctgtgaaatgctctgtctaaaatgcgacatgacttttgtaggcaggttcaggaaagatggaaaaaatccaccctttaataatcacttgcaactcaacacacagtcccgccacactgcctcttccagtaactttacttcagggcttatcaagtctgcaactgtgcccaaagtataggtttacttcagaaaatacgatgtgaccgcagctggaatctggggggc

SEQ ID NO: 3014 - DNA, 406 bp, Bos taurus
  unsure (45): Clone ID: 21-LIB3058-049-Q1-K1-F1
aaagagtaaatctacttactcttggtctattcttaagtactgctnttttggttttttcctttccagactctatcatttatctttttctgaaaaaggttcttaatcttttcctcacgccaatacccactccatggtttctttatttaaatcttggtccaaggtctctggagctaatctaagacaacacaattatagagttgaacaaaagcgtactgtgctttacaacatgtacagacctgtggcagccagatgtcattagctttcagatgctccagtcttcacagttaaacgaacaatgctccttgactctgtggtgtcatcagttgcggcacactaatactttcatgtctcgtctaatatatactgtgtgcatagggactgtttaattattaaaaagtcgtatcta

SEQ ID NO: 3015 - DNA, 403 bp, Bos taurus
  Clone ID: 21-LIB3058-051-Q1-K1-F9
ctagattgcgggcggtcgctcgcgatctttacgcgtgggtaaaaagtgagatttgtggaaataatcagataacatggaagaactcattccaaatatattgatagtgaccataaatataaatgaactaaacttgccacgctaaagacaaacattttactggattagaaaacgaatccagggaaaactgtttacagcagatacaattgaaatataaggacataaagactgaagttaatacgatggatcgattatgtgacaagtcatttgacatactgaaaacattaatgttatcaaggaaaaaaattgcgggtgtgaataaagtgatctagactgtaagacatgttgaggacaaagtgactctatatgataaaagactctcaaagcaatttgggaatactgggga

SEQ ID NO: 3016 - DNA, 416 bp, Bos taurus
  Clone ID: 21-LIB3058-052-Q1-K1-F1
gttctagatcgcgagcggccgcccttttttttttttttttcctacagtattttttaaacttttcagatgagctggaaaacactttagtacattggagttggagttgtattggttacagtcccagctctatagccttatactcatgtcttaagtatcactgattgttctatgaattgttagtttggcacttgacattgtagttatccaccttgcagtttagcctttgcaaaaaggatattgctaggtgtgttcttatttctggttgactattgaatttgtaatttcacaatttcattctgagtcattgtaatccaaaaaggaaaaccatgtaggactaaatttttcacctcacagtgaaaactgaatcagtgcagttttagcaacttcgtacaaaaatgcatcccagcaatgtcgca

SEQ ID NO: 3017 - DNA, 337 bp, Bos taurus
  Clone ID: 21-LIB3058-053-Q1-K1-F9
atcgcgagcggccgtcctttttttttttttttttttggtgagccagatagacatttgatgttaatgacaaagttggagaaaataaattggcaaaaaaaaaaataataataataattaacagaaaatacgttttttacagatatgtatagaaattatgattgatttgtctggtttcttaaggaaaaaaggaacggaggtaaattttttagcttccatgaacatttactctaagatgctgactgcatctcttagtgtatgttccatatgagatcctactattcctgggtcacctgggcacctgatttttagaagccaataggattcattcacaagtagc

SEQ ID NO: 3018 - DNA, 286 bp, Bos taurus
  Clone ID: 21-LIB3058-054-Q1-K1-F1
gctgttcacccccttcctcctgcaggttaggggacagtaacagctccccagagatgctagtcctggggtgctgcaccatcctgcattgttcccttaatcctccccaatcccttgaaaaccatccctgggtcaccctctccccagtcaccccgccagagtggcctcttctttctgccaagaccctggctggtacagatgcaggtatttctagatgtatcctcatggtgagctcatgctaatggaaggatgtgtgcctatttaggaatgtgtatagactatttacctt

SEQ ID NO: 3019 - DNA, 424 bp, Bos taurus
  unsure (389): Clone ID: 21-LIB3058-057-Q1-K1-F9
ctcacgtctctctttcaaacctttaaccatttcttcccagaagagaaattcgaaacactaagacaaaattgttgggtaaaagatccatttgcttttcaaaacccagaatcaataactgagttagacctggtgcctgaagaagagaatgaattattgcagctcagttcttcaatcacattgaagaatgattatgaagcattaagtttatcagcattttggattaagataaaggaagattttcctttgctaagttgaaagagcatcctgctactattaccattcacaacaactagtttgtgtgaactgggattttcggtcttaacccagttaaaaacaaaggaagggaatggattcagtggtgcagcagaagtgcgggtagcactctcctnctgtgttccagactggaacgagctcatgcgcaagc

SEQ ID NO: 3020 - DNA, 442 bp, Bos taurus
  Clone ID: 21-LIB3058-058-Q1-K1-F1
gcatgaggcagattgttcatatctcgtgctttcatttaaccatttaaagtccttacatgttgtttactttattgtttttttttcctgtggaaacaaagacatgcaaaaagattatagcaccagcaatttactcttgaatgcttgatgtggtttttgcattgaaattgtatttttttcagacaattcaaacataacttctgaaattccaagggtaaagtcttttttaatgaaaaagaaaaagagaaaaaaattatcttgagggacttacagcagaattaaacctgcatttggaatgagtcgtgttgtatagagactcacgctattaaacattgactgtgaacagaaaatgacaaactgactcctacatttatataaatatctaatgtgtctgtattattagaatttttatttaatgatgagtaaattaagatttttgtttttt

SEQ ID NO: 3021 - DNA, 429 bp, Bos taurus
  Clone ID: 22-LIB3058-004-Q1-K1-F5
gcaaggccacgttattagtcctctgttccatcttcttgacatctgaccaccagcagaaacaaggatcccagaggtcagagcagtggtgagaggttccccagcgtcccgcgcggagcccgcaaggcctctgtccagtgcacgcggtcttcgcctagcttccccccgtgcctgtcaacggcagagccctttgtcctgtctccccttggcctcgctgccggtacagcacctgtcagagctcaggaccgcgggggtgcactcctttgaccccaggaggtcacggaggaggctggacccctgagctgtgcttcctggcggccgtggtcacgcgctccacggtctgctcttcggctttccagaacgtgcccgcgggaacccctgtgcctgcacagaagcattcgactgcatggctggctaggtctgcaccccagc

SEQ ID NO: 3022 - DNA, 440 bp, Bos taurus
  Clone ID: 22-LIB3058-005-Q1-K1-F5
ggtacagtaagttccctatgtaaaaacaagttccgttctgagagccaagttcgtcagtcaaatttgtttataagtccaacaaagttagttcatctacccaaccagcacaattggctaaatagtactgttctgtaatagatttataagtcttttcacgcaaataatatgtaaacacaaaaaataaacatctttactcgtacagtacagtaccttgaaaagtacagtagtatagtatagcagatggcacatgggctgtcatcgagtgaacaggcgaggagagttactaactcaaggaggtgggagatggaggagcttcagaccatcagcaataggggataccagctgcatcaccactggtttatgtttgcttcagacatgctgggcttgaaataaacacactgtactctgcagcactgtacagtaaagtgcacagaagcaca

SEQ ID NO: 3023 - DNA, 382 bp, Bos taurus
  Clone ID: 22-LIB3058-006-Q1-K1-F5
atttaagagtgctcgattctgtgtgatcgaactgctctaaacacattattgtacacagctgatacgagtagactcacggaatgccatgcgggtgatacacacacaggacatgaaatggctcttatgaatggaccatgaccttagcatacttgatcctgatatgagaagaagagctaccatgtgccatatcgtgtaggctataagcatatctgcgagaggatctatatctaaacgggttcaccaggctgctacttgtgaattgaacttgtctacacagcagattgagaccacttaaatttcccttaggatgctgcccgaattatgtccttgtttagaacattgagaagtatcctagggcacatgctgggtgatagcaacgaga

SEQ ID NO: 3024 - DNA, 216 bp, Bos taurus
  Clone ID: 22-LIB3058-008-Q1-K1-F9
gtgcctatatacacatgatcaatgctgctccagcggttgctcctgagtccttggtcaattctcgtagctctctgatcatcagcgtatgacatatactggaacatataatcatagctgatgccattgactaaggcatagaaatcatctgggatgatatctagactatgcaagacgtctgtgttaggctgaaagacttcgaatagcacgtaatgtgtt

SEQ ID NO: 3025 - DNA, 434 bp, Bos taurus
  Clone ID: 22-LIB3058-011-Q1-K1-F5
agatcccacttttgaaacaagcagaacccccgaagcaggagcagcagaccaaagccagagcccgacgggcggctgtgcatgtgctgtcctttcttgcagtttattctgggcctgtgtggaatagaaagacaattctttatttgactggaaggagagaaaagagaagactcctcagggtttccaaggaagactggagcggctgctttaggaaatcttgaggagttggacacttttcttcctccagcattaattattttgtgggaggaggctgtacactggtgggagtaaaaagcaagcagttcctggcccataatactccagtttaggatgtctgactgatggcatgctggcaccaaccttggaggaagtgatgagcttcagctccaggttcctgtcctgagaccacagcaggatgtgccttggtcaaaggcttg

SEQ ID NO: 3026 - DNA, 430 bp, Bos taurus
  Clone ID: 22-LIB3058-012-Q1-K1-F5
ttttaatttgtgttactaaatgtttacgttttaagattgatctgtaaatattgcagtgtctataatttcagtttttatgattataacaatatggcagggtttttttgtgtgtgtttttttttaaccattattacatactaatgtcttagattctttttctttcctatgttcttgtgtaactagactttttagccactaatatctaaatttatgatagggtttgttatttcattccactagtacttccctcaaggattagcatttgatctttgtaacaagagaatgtcatattcacagaagcaaataattgcaagtgataataacccagtgtttcttctgtgaagaattaatggactttgaaattgttaaataaggagtagcttgttgtatcctagccatttgatgtaatacaagtgttcttgaattattt

SEQ ID NO: 3027 - DNA, 251 bp, Bos taurus
  Clone ID: 22-LIB3058-014-Q1-K1-F9
tcgtaaaatgacacacccaaaaatttcaaattttgatacataactccttcaaccgggtatgtagatcacaaaggctagatatgcgaaccaacaaactcacatatacaaataaataactagatacacgctaagtgctctgaactgcagcccacgatagaaaatgatggtactaaaccaagaaacaagctccgacacgtatgaactacctaataagaaattcctagctccttatgttatcagccaacattaaa

SEQ ID NO: 3028 - DNA, 454 bp, Bos taurus
  Clone ID: 22-LIB3058-016-Q1-K1-F9
ggcaaagtaggctttttgtttactttgctttccctttgattgtgtccaggagaaagatactgtgcgttggactccagctttcttactgccctcttctgccctcatgtgtccaccccacttccttgagtaaagtctaaacattttaaagggaaccctgtagggtgaattgccagcttatggacattgttctttggggcccactttgacagccccatactcttccttatccatttaccaaaacctgggtgttttcttgagccttagcttgagaagctgaggggagatcacagaagggcttcacgacagacccagagcaggctgtgatccaaggtaataaaaacttagtttcactccacctttctaagcttggaaattttttgaagggcctcgtaccacttagaaataaccaaggcagcgttttgagggtcactcctgtcctctggactgttttttt

SEQ ID NO: 3029 - DNA, 248 bp, Bos taurus
  Clone ID: 22-LIB3058-018-Q1-K1-F5
cgagcgcgtgacctttatcttgaatgtatttgtaggtagatttcaatactgggaaaaggcactttagatgcaagggtttattcttaaaaagaagctgcagtttcacgtgattgcatggaataaaattttgctattgactaatgttatctggtacatccacacttaatcatcttgaatagttattctatcatcagtatatgtctatgtcaactttgacgatgccaacatcttctggattaaggtattta

SEQ ID NO: 3030 - DNA, 412 bp, Bos taurus
  Clone ID: 22-LIB3058-024-Q1-K1-F5
tcgctaacaacgaggccaagctggtctagtctatgtccagaggctagatcgtgctgtaaatgctgcacgtggggcttttgccaggagaggcggccagcaggactctgggagtgacagaccttggacgagctccaattctgtcgaccgggtcaaggcctcctaccttcatagacctgggcaccacaagtgcaatcaggtgtactgaatactgtagctggctactggacagatggtcacgtgagctccagacacatcatagggaacctgtcagcatcctggccaggatctcagtcttcaagtcacctgtgtctccattgggctcaccgtggtcccttccatcaagccctggagcatgttcacaatatatgtcaagtgattagatgtgacgttgactccatccagggatgtgcct

SEQ ID NO: 3031 - DNA, 102 bp, Bos taurus
  Clone ID: 22-LIB3058-030-Q1-K1-F5
tcgcggacgcgtggggttctagatcgcgagcggccccccttttttttttttttgggttatgttttttttttgatgtttgtttttgttttttttttttttttt

SEQ ID NO: 3032 - DNA, 359 bp, Bos taurus
  Clone ID: 22-LIB3058-034-Q1-K1-F5
ctagatctttcttccctgcccccaaattttctgccagattttgtctgttacactttaaatgtggttcccaaatgcagctgtactgcccaaaatgaaccttactgtgggcatcttagtgaaatcagccagtgtttcttatccagatctacataggatcctgttatctgcgctccctaagacaagttgcagagtgtcttcctgagaaccaaatatgactcatttccttgcatttaataattcatttgattatatgtgagggcttcccagatggtgctagtggtaaagaacctgcctgccaatgcaagagacataagaaacactggttcagtcccttgggaagatcccctgaagaaagaaat

SEQ ID NO: 3033 - DNA, 437 bp, Bos taurus
  unsure (391),(425): unsure at all n locations; Clone ID: 22-LIB3058-035-Q1-K1-F5
gttgaggcgttggaattgcacatacatttggtcgcacagaaagacacacagacgtagggctgtgcatagcccctgacagcaaataggtgtcactagttaaaggcctctgatgaaagattgggaacagaagaaggtggcttctccaaaccaaccaccaccagctgccctggaggaggccaagatctctggcacttgtgggagcccccgaacatcccctgagcctcatgaccctggaggttcccagcccctgacccctcggatggagagccactcagaggaggaagaccgtcctggggccggcggtggcctgtgctggaatggtaggagtccccgcacccagagcctaggggcttgttccgcagaggccatgctggcccggaagaaacaccgncggcggccctcaaagcgcaagaggcactggcggncctacttggagc

SEQ ID NO: 3034 - DNA, 436 bp, Bos taurus
  Clone ID: 22-LIB3058-036-Q1-K1-F5
ggaagcttggcatgcagtgcactgggttacaaagagttggacatgactgagcaactgaacagcaacatgggagtaagagccaagaacaagcctagtttaaccccacttagaaaccaaaggagccaatttaagaaaaatcaagtttaagaagagggattaaactcacacattcaatcacaatatttccccttaagaatccatgctcccaatgcaggggacctgggttccatccctggtcaagaaactagatcccacatgccacaactaaagatccctcatgctgcaactaaagatctggtaggctgcaatgaagaagattttgtgtgccttgactaagacccagaacagtcaaataaataagtaaattttaaataaataaatacaaaaaattttttaaaccttaattgcaaaaatgattttttaaagaaataaaccc

SEQ ID NO: 3035 - DNA, 381 bp, Bos taurus
  unsure (139): Clone ID: 22-LIB3058-038-Q1-K1-F9
cacgcgtccgcggacgcgtggtcggacctggttatttttaactgctaatcacttgccttatagttgtcgtcattgcattatcctgtttccctgagtttctttgtattccctgagcggagcccagagttctttttgcatntctacagctctggcacaaatgacgagcataggtcagctcaatcaaagaatgattcataactgaagtgttccatcctgagattggcacctgctgctgtgtgccctgtattcggatgcttgggagactgaacatatatatatagagggtcaatacgtagaagcctatctctcttggggggtggtacgcctagtggggcctgtagagcaggtgcaagacatactaaagaggtggctgagctggca

SEQ ID NO: 3036 - DNA, 422 bp, Bos taurus
  Clone ID: 22-LIB3058-042-Q1-K1-F5
ttgtttttttttttttttttgaatttttgactttactttattcagcaaaatcatttatttacacagtggggaatgctggtttgattctgtcaatgaaataaaaacaaggtgaacagagacaatactgaattgtgtatgtattttgtaccagaggtgaccaactgtttccttacctgtgtcaggaacaccaagagcaacggtatcacgagacactggttaacaatacaccacaaaggtccagtgacgccctgggcttccaatgcaatcaccaactttttctttttttataaatatataaaaaaacaaaaagtcagcaaaaccagcattatgatgtagtaaacagagtgtaactctaaagtcagtgggtcagtaaaaaccttatcagaccatccgtagtttacaaagtgatctgttcttcctca

SEQ ID NO: 3037 - DNA, 346 bp, Bos taurus
  Clone ID: 22-LIB3058-044-Q1-K1-F5
gggctgcctcagagagtcttctcccattatccaactgttaaactaaaatgggtttgtggataatcctgtatgcctgtggatggcaggaagaaggaaatgaacacatcctttgcctgagtcttgccattgtaggagatatttgcaagatgaatggactttttactgtgtttcttcaccttcccccatctctgatctgtaaaagaaactggccttcagactccagtaagagggttagtttgagacatttatctgccctcttctattccttgccccaacgcctcatctgcaattcattggcctgtcgtggggtgaagagcttggacttggtaacaaatctatacagctt

SEQ ID NO: 3038 - DNA, 428 bp, Bos taurus
  unsure (402): Clone ID: 22-LIB3058-044-Q1-K1-F9
gctgtcagctcacccttgaagatcagcgtggtccctgagggtccagggtgggcgaccctgcacgcccaccttctgccctgggacggccttggacgcggccctggggaccctgccgccgggcccccatgcagagtgtggagaccggcctgtggctctgagcttcctttggtttctttcccgcctcctctcacctcttaaagcacttcctttcctaaccgatcacagtggagcggcttcgcggcgggagctttggtacgtggcaggcgggcgggcagctgggagtgtcccgtgtggtggccgcggctcacaccccggaggagccggatcggcgcgtgcggagaagggacgcggggcggactcggccgggcctcggggggtcccgcgacggcgcaggcgcgcggngaccgcagctgcccccgcgacgacct

SEQ ID NO: 3039 - DNA, 436 bp, Bos taurus
  unsure (345),(402): unsure at all n locations; Clone ID: 22-LIB3058-045-Q1-K1-F5
cggacgcgtgggtggttatgaacagggttaggggagtccttcccacttgcctccccggctcatctctagtctcattccacaatgccccaagccctgacggtctgtccttttctttttcctcctttcctcagggacctgtgctgctctgtcctcgtgtcccactcggttgtttagttcaggcactttatcatttttctttcctatcccagcccctctccgctttacttccctgctgtgtcctgtccttagcagctcaatccccactctttaccagctcttcctccccagctggccccagctaagctttagggaggctcccgtctgggaggtacagatgaaacctgnggtggtgggtcgggtcagtagttaatgcacttaagtcactgtagcccgtggaacctncactgcacccttgccctcgttcatcctggccttt

SEQ ID NO: 3040 - DNA, 437 bp, Bos taurus
  Clone ID: 22-LIB3058-050-Q1-K1-F9
ttccaagtgggttcacttcctggcggcatctgagagccagcaatgcaaataaatgagttctacctcagacatgaagtatttgggaaacttggggtgtcactgttactggctcaggcacttgtgatttagagctggaatgaactcatccagaaggcaggagaggtgggcgcagcgatggccctgcccaggaagggctgccagcggccccttctgcctggagcctgttgctcctgccttctcaggactttctgtccagtgttcacgagtcgtgtttcttgttgagttacactttgatagcgagacatctcagtgcccccccagcctctccctgccccgtttgtaacccttggaggctgtcttgggacaggcacggagagggacactggaagccatcgtgtcggcctcgtcctgtcaccacttccgttttgtggtgtcac

SEQ ID NO: 3041 - DNA, 354 bp, Bos taurus
  Clone ID: 22-LIB3058-052-Q1-K1-F5
tcgagcacgatgggcgccctctgttccaatttgccgccgtcgccgctgctgctgataatgctgggggcatggggaggccagccaaggagagtaggaacttggccaagacattctacttctcgtaccttacctttctcatctgtaagatggaggtagagagttgacccagccctccttgtgtcctgagattctgtgatttggggctgtggaaagacagaagaagaagctgaacccttcaaggccacaaggctaccctttgagggcaggctaggggaattgggtgctgtgcccgggaagtgctggtccctcaggggcccctgtaccgtgtggctggcaccggcatctccatcttct

SEQ ID NO: 3042 - DNA, 420 bp, Bos taurus
  unsure (402): Clone ID: 22-LIB3058-053-Q1-K1-F5
gtcctgtgtccccatcgctgaagcccctgtcggtgtcgtgtgggtggcacccaaggtgcctcggtgcgtcccggctggcatggtgggcctgcagagcgcactgagataaggccatcatttgggtactcttgacagtttcctcattgatttttggaggcctccagatttgggtcttgtcttcatttcgtgatacatcaatttgtacaaagttggcttaaattttctctaccacatagttcgtcagtttcctctctcatgccaggataacaaaacctgtcattacatccaacatgtctctgatttgtaaggttccccaaactagtctgaacgcgtgtggaggaataggaagggagagctggtggcgtggcgtggctgcgttagacgtgcagtacactgtggctntctcccctctccagtttg

SEQ ID NO: 3043 - DNA, 260 bp, Bos taurus
  Clone ID: 22-LIB3058-054-Q1-K1-F9
agaaaacattgagcttttaatttagttttggtagtatcgtgcttttacctaaatatggtatttttagactgtatcttaaccacagccacagggatcatgtttcattgcacttacctatttgccatgtctgcctatccttggtaaatacattactatctccaaattgcctaaaatctgctatgattctacagtaaatagctcatgggattactatttatcactaataaaagggcaccatagtatgttttggtactttaagc

SEQ ID NO: 3044 - DNA, 291 bp, Bos taurus
  unsure (34): Clone ID: 22-LIB3058-057-Q1-K1-F5
taagcgtgcttccattattgagctttcgttcttnttttatattattattttttttgtgtttttctatagattagcctacctggtctttttcaatgattatttttatgacttcaggtagtttccttatatgtatagtatgctctgtacttatttgatgacttaaaaccatatacttatataatttttggaactctttttctgtatggtcctatcctgttaatgcagttatatccttacatgcaattttttcttatctgatactattcttcatgaatttttgctatccttact

SEQ ID NO: 3045 - DNA, 427 bp, Bos taurus
  Clone ID: 23-LIB3058-002-Q1-K1-F11
gacccacgcgtacgcttactggaaacgaaagaaacagctgacagagtgcatctactctccctttttctgaaaaataatggatcagtgccacccacgggtctgcgggctgcgtggtggcacctgcgcacctgcgccctggacaattgcccatcatcgtgccctcctcctcttcagaagtccaaagttctgtcttttttaagtagcctctataactgattattttatgaatagtattccttttggctgccaatcttatttacctttaaataatttctgaagtttaaccctttcaaaaatacatggtttaaacaaagataaggattgccattacctattctgctacttttcttaaattttggttaaaaaaaccattatacaccaccatagttcactcttgtatcctggtaaagatcttaatcagacttat

SEQ ID NO: 3046 - DNA, 393 bp, Bos taurus
  Clone ID: 23-LIB3058-004-Q1-K1-F11
caagtgggtgatcacttgctagagctgttggaatccagccctcttaaccctgaatctctgcacacggggtgtggattagctgtgaggcagtaggaactcaagtatgtatgcgctgttgagcagaaagccatgggataggaaaacttgtgcagaagacctactacaagagtcaggacctaagtctagcttctaaacgaggccagaggtgctttgctatattaacaccaattcctgcactcagtcttgtgtgtgcaattcttgtgtaatttgggtataaacccataggtggttcaacttgggtcttttctctagccttggaggttgggcgcacgttcttcagcatggctatgcagtgacccatgtaactcagtggtaaggctttaagctcactct

SEQ ID NO: 3047 - DNA, 420 bp, Bos taurus
  Clone ID: 23-LIB3058-004-Q1-K1-F3
ctgtgaggtagacactgagaaataaaaccgggacttgatcttgcaagggattgagtcaggatttgagtccctgtctgttttagttcaagatttttgctctgaaagatttcgttatgtagttttaaaatgctgtgaaattttgtccgttctaaataattgtgtaatattacatgggactctttttgtggttccattgcttggtatgtaatgttagtttaagcaataatgaggattaggggggtcaccttgaaatgggagaagttgtgcttgtggaggtgatcattattggaacccccatacatttcatcctgttccctgacgttagcctgtaatgtaatatcttttcagatttacttagaaactattagatacctaaatgtttggaaggattacctaacagatttaagataataggacttc

SEQ ID NO: 3048 - DNA, 253 bp, Bos taurus
  Clone ID: 23-LIB3058-005-Q1-K1-F3
attctatatgcccactataaatgtgattttgtttgccatttctgataactatcatgacgaatttggattacgtttattttacaaaggtatggacagtttacagagcactgactaaatcttcactagatgcattggcactaaatgttaatgatatacttttgcaattcattctgtgcatgaaatgattctacttataatatcagtattaaagagttgaaatggctgcattttatcctaacatatttgcactgga

SEQ ID NO: 3049 - DNA, 204 bp, Bos taurus
  Clone ID: 23-LIB3058-006-Q1-K1-F11
gctgccgtcgccccccgacccggcccaggcgcccgcgggcggtgactgcagggccgcgccgcctgtgggttgcagtcgctgccgccgccgccgtcaggcactccggagctgtccgctttagcaccacggcggcggcagtagcggcggcgcggaccggtcctgagcctgccgtcgagctcttgcactttagaacctctggccgta

SEQ ID NO: 3050 - DNA, 423 bp, Bos taurus
  Clone ID: 23-LIB3058-006-Q1-K1-F3
cattggtgtattttacataatgtattctgcataaaaatgagtgactgtatattatgatgcttttcaaatatcagtatcttgaaatgttttaagttttcagatttttttatctaaaatatgaaaatctgttttgtgatacaagtgattgattttctctagaaatgcttttgcacatttatctttttatttcgggttcttcctacatagacacagtttggtgtcaaactttcattaggatcaatagtaaatacagaatatcttagccaaactgagtctgtattgtctacattttatatactattatagaagtatttatattgtcttttcaatatgtttggaattgtatccacaaatacagtcagagcttcccatttctagttgcaaaaggtttgtcctaaactcaatcgacatcactttatgttt

SEQ ID NO: 3051 - DNA, 414 bp, Bos taurus
  Clone ID: 23-LIB3058-010-Q1-K1-F11
aagagttagagatctaatttgtagtaaaagaaggaagcagaggcatagaattacatttaaaaagttgaatattaaaaacatttgactttgggatatagttcatgtacagtaatagagatctagcttgtttatacatgtggatacttacttcctgtaaaattaataactttaaaaatgacaggacaagctctgatagtatcagctgatcagtacagtctatattttgtgtacataacttgagtgaccttggcagataccattctgtgctttaagattcttaattatgaggagattgagcttttcaagatcagtagtattaatttttcaaatgaaatcgtgcttggaatgcctgtctatggtgtagatgaaaaaaaggtttgctgctctagatagagctggattggaaagcccagc

SEQ ID NO: 3052 - DNA, 343 bp, Bos taurus
  Clone ID: 23-LIB3058-012-Q1-K1-F3
ttaagattgcatctgtactatattgctttgagttgtccattgctttcttatggtcctgtattcaatttctagcacatctgagatttttctccacttacacatatctgcactgcttacacttatgtgcaatcttactccttgactgcacacagatgtggaaagctcgatataaaataaatgttagagcttgattgttataaacatcctaatatgcagtttggacatgatttattgaattcaggttctctaaactgagagtgaaatgcatgccttccgaaaatgttttggctttgctaattctgtaataagcatttcattgagagatctcagtccaggtatacca

SEQ ID NO: 3053 - DNA, 385 bp, Bos taurus
  unsure (335): Clone ID: 23-LIB3058-013-Q1-K1-F11
agcaaggagagcgagggtacgtgggcctgcccggcgctgggggctgggacggccaagcacaaatgcctgaagtaagtaccaacaaggccacggatccgtgtccctgagtgggcacgccagacggcgccaggcttgatgggcacgtgaggagctgggggagcgatgccaggggaagtcctgcttgaggtaggggctgtgtgagagggagtgccaggagccgggaagaagcatgcgagactcagatgggctgtagctcagaacaccatccatcccgagagtggaagtcatgcaagtactatcctgaggcaactggaaggagagagtgccctggcttnctcacgtatggaggtcacttctctgtgaaagtggtgatgttaataacagg

SEQ ID NO: 3054 - DNA, 389 bp, Bos taurus
  Clone ID: 23-LIB3058-016-Q1-K1-F3
caggagtgcagcagggaaccggccttctctgctccaatgaggagatggacactgcgtgctgaccatcactgctgccgggagcgagagacggaagcaaaaggggcagctgaaacccacctgcgcactcaccctccacgtggaaggcggccggggcgacgccccaaggcacccagattcgaaactcacctgtcgcagccgggaggcgggattcccggagtggctggctccccgcatgtctgcggaggcctcctgggtgggagcgggccctcctcctggctcctcgcctgggctgacacgagctggtccgtccagggaccccacgtggggccctgctccataggcagcatcgacacccgcgggaccctttaggatcacaccgaccccgtgcc

SEQ ID NO: 3055 - DNA, 440 bp, Bos taurus
  Clone ID: 23-LIB3058-018-Q1-K1-F11
attatttaccttattctgagtatctgttgaagtgaaaagattttttgataaattgggctacctaaaatatgttatcaagattaattatacttcattattctttaaaaaatgtgactgctaggtcaacataaaacttataattatgtatgtagtgtgcattgctggatggtgctgcgttagaacctgtttcctctcccaggaggcaaggttaaggatgttggtgaacaagggtgtgcaaatgaggtgatatgacagctgctttcatccatttggatgggtctcattcatagaagaggttttctctgctgtatatttctcagaaggtggaaggaagacaaatagctggaatgtcacgttaatatgagaaagatgtttataaagttgtccagatatggttatgggctccttctaaatgtagcatacccatcatcattattata

SEQ ID NO: 3056 - DNA, 423 bp, Bos taurus
  Clone ID: 23-LIB3058-019-Q1-K1-F11
cggaacgaccgcacgcgtcccgctctggcgtattgtggttaaagcgtccttccgaagaggtactctgagaaactgcaaaatgcttaagcacttacaatgtaaaaaccaaactgaattggacttcataacatgcctcttagtctcgcttgtccttgacggtaaattaagtttgacattgtcagactgggtaagcaccacagtaaaatagtacgaacaaataagaggcttttcccctgtgtccttaagccatatcgttctacatatatcccgtaaggaaacggcaaatgaagttttagtagctggtctattcctgatctgccttcattataatgaactgaatccctgtttatgatcattccccgtacagccatgctcacacgacagaataacagaacagacatgaacaatccttccaagttgctt

SEQ ID NO: 3057 - DNA, 214 bp, Bos taurus
  Clone ID: 23-LIB3058-020-Q1-K1-F3
cggacgcgtgggtggcaaatagtttactgacccagcagacttatttctgctcctgttgggaaaagaattggtcttgatttatactggttgtaaaagaaacagaataacgtgttttcttcgtttaactggtagttgaatatagtacttagatacaatagatggcttttctctttttggaatgttttgtatttgaacctaataaaacttgacgtgc

SEQ ID NO: 3058 - DNA, 268 bp, Bos taurus
  Clone ID: 23-LIB3058-027-Q1-K1-F3
gagggcagctccaatgcatttttgcataaggccacccatttccccctgtgatatgtgttaatagtcatctagttccttgagacagcccttatcataaaagattacaacaacaactttgtcaacttttgaaccttcaataagttgaataggaaaaagttaagttgattttaaccaactcttaaagcattattcaaacataaacctacccttttatacaaagataatatatatacagaccactcaagatgcccctgaaaaagttcgaaac

SEQ ID NO: 3059 - DNA, 312 bp, Bos taurus
  Clone ID: 23-LIB3058-028-Q1-K1-F3
ccggattcccggtggacccagcgtccgaaggaaacatgtatattgagagcaaagagaagaacaagtgaaggtgcatgataaagcgttttgttaatgatgaaaacataatggttcattagtgtgtctagagcttaatttctaacaggcaagctggggattttaggtacaatgatccagtttagtttctcaaagcctagctgctatagccacagtataggatctcttcctattagattgctactgcattgaaatgttgcagcttcctagagttctttttaagaacaaactatggttatttttaagttgttgctt

SEQ ID NO: 3060 - DNA, 441 bp, Bos taurus
  unsure (409): Clone ID: 23-LIB3058-029-Q1-K1-F3
gtttcttgaagcaagtggaggtcctggaagtctggttcccaccttgacagcctcttcgcataggcaatgcgcacccaggcgccggagggcagaggaccaaaagctgccaatcactgcacctgccatctctgtgaagaggcccacttctaacagactgggctgactcccatcatgcaaggcaggatcagcctccccactctctgccacttccttctcccttgggccttcaccaccttccacagagccctggggagccaagaggtcattcactctcgtcgtggggccacgaccacgctgccctgcgtcctgggcgccccgcctcccagctacaaggtgcgctggagtaaagtggagcccggggaactccgggaaacgcccatcctcatcaccaacggactgcatgcccggngctacgggcccctgggggggcgcgccaggatg

SEQ ID NO: 3061 - DNA, 425 bp, Bos taurus
  Clone ID: 23-LIB3058-034-Q1-K1-F11
ctcttcagggcccccagtgcacaccatggtggtctcctgttgaatgatccttgttgtcctggtgtgggacccagccctcaccttccccagtactaacctgggaggtgcccagggcactgggcccaagtgagcacaggaagctgggcagatcatgtggggagatgaccttgatctttgattgctaccctaaccttgacctctaacctgtgatttccctcagctcctgggagagatgtcctaatatctcttagggacccagacccctaaatgatccctctccttcatcttggtgttaggcggagaaggcatgtatccctgctccctaatctgggtgtctgtagctaagggacaagaggttgtggaagttgtccgtggtgactcccccagactctccctccttatcccagattgcaagggtaaggggc

SEQ ID NO: 3062 - DNA, 398 bp, Bos taurus
  Clone ID: 23-LIB3058-035-Q1-K1-F3
tgcaccgcggtcaccagccaccgcctgttatggctggacacagcctggccagctcccagcgcaactccatggttcccagtgcggcgaccctcatcatcgtggtgtgcgtgggcttcctggtgctcatggtcgtcctgggtctcgtgcgcattcactcactgcaccgtcgcgtctcgggggccagtgggcctaccggggcctacagcgaccccaaggatcccgatctcttctgggatgactcagctctcaccattatcgtgaaccccatggagtcctaccagagccggcaggtctgcgtggcgggcgctgcaagcggccagcaagacgacgaggacagcagcgactcggaggcggtcgactcacccagcagcgatgagagacgcatcatcgagaccccc

SEQ ID NO: 3063 - DNA, 430 bp, Bos taurus
  unsure (408): Clone ID: 23-LIB3058-036-Q1-K1-F11
gcgctgcccgctctacaggggcacccttgtgccattgctggcggaccaccgtacacacatccggcggggcagcacctacttcctgcacgtgcagagcatgctcgcacagctgtgtgccaaggccttgctctacaccttctgccatcacctgcacctgcccgcgcacggcggtgaggccccggagctggctgccagtcgccaggccagcttcctgcagctgacactggggctagtgcatgaggacgtcaaggtggtgcggtacctggcggagctgctgcggctgcactacacgcaggagcggcgcgggaccagccagcctgccctcaggttcgactacgtgcccagctttctgtacaagatctgagtccagcccgactcggtgactgagacctgtggcccagggttggngaggggttggcatgactgagcg

SEQ ID NO: 3064 - DNA, 408 bp, Bos taurus
  unsure (90),(233),(368): unsure at all n locations; Clone ID: 23-LIB3058-037-Q1-K1-F3
tcggggggccggagccatgtcggtgaacattgatttgctggggcaccaggtcatgatcaggcagttcgtgctggccgcgggctgcgcggncgaccaggcgaagcagctgctgcaggcggcccactggcagtttgagaccgccctgagcacgtttttccaagaaaccaacattcccaacggtcaccaccaccaccagatgatgtgtacccccagcaacacacctgccacaccgnccaacttccctgacgcgctggccatgttctcaaagcttcgagcctccgagggcctgcagagcagcaacagccccatgaccgccgtggcctgctcaccccctgcaaacttcagccccttctgggcctcgtccccgnccagccaccaggccggctggatccccgccttcttccccac

SEQ ID NO: 3065 - DNA, 424 bp, Bos taurus
  unsure (343),(381),(383): unsure at all n locations; Clone ID: 23-LIB3058-042-Q1-K1-F3
ctggcccgaggtctgttgcgggtggcttgacgtcggggccgctgccaccccgtgtgcctgttgcccgggccgccgggagcccgggcgccgccgtgccgaggggcgccgcgcggccgaggctcgggcctggtgccgctgctggcagcgctcgcctggtcctcgaggcccgcggcggcggagcaggagcggcggggcgcgggcggggctgcggccggggacgccgaggccgagatcatccagctgctgaagcgagccaagttctgcatcatgaaagatgagccagaagaggcagagcttattttgcatgacgctcttcatcttgcccacaagagtcacaacacanaggccatcgcttacacttatgacttggcagaaaaactntntaaagcaacaatgagttacctgcttggagggggcatgcaac

SEQ ID NO: 3066 - DNA, 415 bp, Bos taurus
  Clone ID: 23-LIB3058-043-Q1-K1-F11
ccctgatggccagggacagcagtgcagcttcctgaagagactgggaggaaggaaaacccattccctttggctgggagttacaccatactgccactgtgacctggagctggccagataccaccctcaaaacgagtacgattccccttcccccacacctgcttcatgagtaaatttaggtacttgaaagcagttttttcccccctacgattgtcatgaatggttaaaagaagtgattcagcgcaagagttccaagggaacatctagtgtgtttttctggataaaatgatgttagtgctggagtatcaaatttcatggaactattaaagtttttgtaaagctatgtaatggaagatttctcttggtaacaacaaatggagggtgcattgtgtgcaaagttatttaaatttatattcca

SEQ ID NO: 3067 - DNA, 298 bp, Bos taurus
  Clone ID: 23-LIB3058-045-Q1-K1-F3
tcctaatcttgggatggtaatggctttttccacctcggccaagcccacactatacctggctgagacagtgcatctcacttcaaggggttgtggtcaagtaaactgatttgggttctgatggttaggaagagaaagaggtaatgtcgaccctcagataacctggcccagggcagctgactccccgccccctccccagaccccggctctgctggaaccccaaactctgccatccttttgttctgcctctcccccctcacacgtagatttgtctctgcatgcgtgagctttcctttctttg

SEQ ID NO: 3068 - DNA, 385 bp, Bos taurus
  Clone ID: 23-LIB3058-051-Q1-K1-F11
ggaggctgtagcctgtgacactgagggcttcgtgccacccaaggtcatgctcatttcctccaaagtgcccaaagccgagtacatccccacaatcatccgcagggacgaccccgccatcatccccatcctctacgaccatgagcatgcaaccttcgaggacatcctggaggagatagagaagaagctgaatatctaccacaagggggccaaaatctggaagatgctgattttctgccagagtgggccaggacacttgtacctgctcaagaacaaggtggccacctttgccaaagtggataatgaagaggacatgatccacttctggaagcggctgatccgcttaatgggcaaagtgaaccctgagccgaatgtcatccatgtcatg

SEQ ID NO: 3069 - DNA, 423 bp, Bos taurus
  Clone ID: 23-LIB3058-051-Q1-K1-F3
ataaaaaatcccagcttaatccaatttcttattaaccaggagggctttttaatatcccatgtcaccttctgctgaaaaagaaccctctgcctcccaggattggataaatccgagattgattgagattgtgacccaccttctctctatatatcaatctaaagatgtcaggcagactgttagtgctgcttgtaccgttcccactgctgtttgtttgctttcggagtgttcctctttggatgaataaaaatactctgtcctgtgagctctaagattaagatgtgccactctcttgaccccccccactacggctccatcaatattgatttgaaacaaacccctatgggtgactgtgttcctggcaacgtttcaatactaacatgtggctaatttcctagaggatttttctttccctttctgtgctca

SEQ ID NO: 3070 - DNA, 216 bp, Bos taurus
  Clone ID: 23-LIB3058-054-Q1-K1-F3
tcccggtcgacctacgcgttcgatcgcgagcggccgtccttttttttttttttctgaattatttctaggagcctaagtttagaatttaaatatcaatcaataggaaatgcttaaatttaggttcatccatataatgaaacatcatacagctataaggagaatgaaaacttttatatgtactttatagattaattcctaagacaaaattgttaatac

SEQ ID NO: 3071 - DNA, 413 bp, Bos taurus
  Clone ID: 24-LIB3058-003-Q1-K1-F11
ctcactggaaacgaaagaaacagctgacagagtgcatctactctccctttttctgaaaaataatggatcagtgccacccacgggtctgcgggctgcgtggtggcacctgcgcacctgcgccctggacaattgcccatcatcgtgccctcctcctcttcagaagtccaaagttctgtcttttttaagtagcctctataactgattattttatgaatagtattccttttggctgccaatcttatttacctttaaataatttctgaagtttaaccctttcaaaaatacatggtttaaacaaagataaggattgccattaccttttcttgtactatttttaaatcttgcttaaaaaaaccattatacaccaccataattcactcttgtatcctggtaaagcatcttaatcagactta

SEQ ID NO: 3072 - DNA, 422 bp, Bos taurus
  unsure (309),(318): unsure at all n locations; Clone ID: 24-LIB3058-003-Q1-K1-F7
cgagagccgggcctggtgttaaagctgctggagacggtgatggaagtcagcacgatagacagggctgtctccgaacctcagatcaaacaggtgttcgacttgatcctggagtgttacacacacctctctctaccagataaaaataaagtcctctcgggggtcctgctctcctgggggcgcaagggcctctctgagaaattgttagctcacttggagggctttcaggaggacctcaacacgactttcaaccagctcacacagagcgcctctgaacagggctttggctaaggctgtgcttccgtggcccgnctggtcatnctgcacccagagatcacggtgaagaagttgtgcaacatggctgtggtcaacctcggcacccacaagttcctggctcagattctcactgccttccccgttctccg

SEQ ID NO: 3073 - DNA, 444 bp, Bos taurus
  unsure (428): Clone ID: 24-LIB3058-004-Q1-K1-F7
gcagtgggatgggaaccaaggaaaggctgtctccttggtatttcagctgctacagatcagtgctgccaacctttggggtgaaatggtcaaaatcgaagccctgtcaaaatttactagtacgatctttgttgcttcaagcacttgaacagttgtgatatttaaggagaggaaagttgaatttcaggtcttgccattgccattaaaaacaaattaagacaggaaacttggttttacctgggtacaaactgacttgaatattcagtacctgagacatctgaccactgtcactgtgccaaaccaaagagcagctgcagcttagtggtcactaaacttgcaccgcttacaaaagcagtttcatctttgcatgtggaagttgtttttttaattgttttacatatttagtggttatgacccagtgtgtcctaagntaattgaacttagctt

SEQ ID NO: 3074 - DNA, 450 bp, Bos taurus
  Clone ID: 24-LIB3058-005-Q1-K1-F11
gttctagatcgcgagcggccgcccttttttttttttttttgcatgcaggaaaagctttattaagtcatagaactattataattttttttaaacagggatgtagaatactcaaacattttaaatgacctatgaaacaactggcatatatttagtaagcaagatccactttaacaattctctctgctcccaccctcaatgctcaactataggacattcatttatttatcatgtttagtatttctgtctcacagccatctgtcagaccttttgctgcaaaaacgtgttttttaacaattaaatacacaatggggagatatggttagacatttacaggacttgaaatgttgaagaataatacacaataataggatcacaagaagggcagtggtatctttcaattcattttgctatttccagtctctttttcaaacattaatctctaaagtcagt

SEQ ID NO: 3075 - DNA, 436 bp, Bos taurus
  Clone ID: 24-LIB3058-005-Q1-K1-F7
ctgaaactaacataacattgtaaatcaactataattaaaataactacaaatagggtcactagcctctaggtttcagttatctaatctggaaaatggaaagaccaccttagatgccttgtaatacagatgctgtctggttcccctgcgtctcagtaattctgttgctgttagtgcttggtgatggacttaatctggaaacatcctcaaaaagttgaaatgacagcaaagaataccaccttatatcaacaaaagacctcattaatagtgaagccatgggactctgggccctttgtgatccaaataacatagcatctaaaaatacaagggaaaagctgttagaactcagaaattactatgtctaagcctgtgacaaatgaagacagaagtacttaggaatgtaaaggatttgaatagatttattagagtgtaactggga

SEQ ID NO: 3076 - DNA, 379 bp, Bos taurus
  Clone ID: 24-LIB3058-006-Q1-K1-F7
gggatgcacaggtccccacggctgtgactcaaagggcagagaggtgttagaaattttcctacttccagcaaaggaggaaaggttgcagtgaaaaattttccagtctttcacaactaacaggaaaattgcttttcatggtattcttattcaagaatttcacttattccacccccttccacctccccgtccttttagagattgtaaggccctggagagtagccactcatcatttcagcgtgttcacctatgccttctcaaaacatggagaaaacgtatccagacagtgaagttatttagcagtggtttttggaagatcactggcgctgatggtagtagaatcctggaaacttgtccgtcctaaggaatctattgtacttct

SEQ ID NO: 3077 - DNA, 246 bp, Bos taurus
  Clone ID: 24-LIB3058-011-Q1-K1-F7
gcctctgcccagctccactgcgcccagcgtgttccagggttctgaggagtcagggagaaagtgggcatgaaagaaggagatctagggtcgaagggagtgtcttgtggccatggaaaacatgggggctggtaggacttgggcccaaagctcagcagcacagccagaaagaagtcggaaagttgctcccctctgactcggcctgggaggaaaggagaagacgttgtgctttggagatgacattgttgg

SEQ ID NO: 3078 - DNA, 368 bp, Bos taurus
  Clone ID: 24-LIB3058-012-Q1-K1-F11
cccatctccgcttgggcaatgtcatttcttataccctaaatacacatttaagagggaagtgcttgagccttcaggtcactgcctgttcactctttctattgaagtgtgaatatttattacttaggttttaaatgaattattgtagctttttgcacttgtctgttatattactgtatacttactttgcttatggtgggctgtcactgggcttttctgatgtggacatgtgattacacagagaagccaaccaaaggtcaactgatgatggggcataggacatgtactcaaccagtactttaggctaatttagcttattataaattgggacctaagtttgagggggaatatttgaaaaccatgtgtctagc

SEQ ID NO: 3079 - DNA, 436 bp, Bos taurus
  Clone ID: 24-LIB3058-013-Q1-K1-F7
cggacgcgtgggtttgttcaaatctgcgtggtgcttctttagtaaatactgtacagattttaccatggaggactttttttttagtttttaccttttcttaattacccttattccaaacggatgaacactttctacaactgctgaccattgtaaaatactgtgtatataaatcacattgaaaataacgccctggactagaacatctcaaatgctgcttaatcacagactcaggttgaccactcgtattccatgcaatgctcctccaaggtagacatccggtgcaaggccaaccgggaaaccgtgggattattaaaagtacaaactgacagcgtgtatatttaatttaaagacgtatttaaagattcacaagctctcgaccagacttttgagagcagcctgttttctgtaatgtctgatactagaaactaatttgctt

SEQ ID NO: 3080 - DNA, 429 bp, Bos taurus
  Clone ID: 24-LIB3058-014-Q1-K1-F7
tcggaaaatgatgcaccccaaaaaatccaaatgagaaacataattgcttcaaaacatttatatagttggaaagttatatttaagtgaaaatttgaactgtcatgtacaaataaaatctaagatgcatgcttagtgctctgcacggcagcctgtgattgaaaatgatgggatagaattatgtatcaagtactgacactcctgttgtacccactggaattgtattagctgcttatgttatgtgcttccatgataacctgcttattcagatcgaagtatttcagtatgaaagagcattcatagataatgaaaggtacttaactcatatggtttactttaaaatatttataaatatggcttaaagaaatgtcagtgatatcaattacataccgtttttacttgcataatttccttcgtattatgtgcagattt

SEQ ID NO: 3081 - DNA, 448 bp, Bos taurus
  Clone ID: 24-LIB3058-015-Q1-K1-F7
taaaccactctgcacagtggcagccaggtttactgcacaaaccctacacagagaatgcaggagcagctgggcaaccctgcagtgcttgtggagatgactcagaatctggaactttctctgtgtagggtttgtgcagtaaaccactctgcacagtggcagccaggtcacctctgccgtgccttcagttcagcctcactgggctgagctccggcccaaggccagtgatgcggcaatggctgcatgggggccttctccaaggccggctttcctcagaatcttccatctccagccccctgggagaccaggccgatcctacaaggcccgacagctccattaagcactttatgagaaaggcaggaccccgggtgtggtcgtagctcttcaacactttgggccgctggtcctttttccccgaccgaagcttcaaccccacactcgtgaggtggag

SEQ ID NO: 3082 - DNA, 406 bp, Bos taurus
  unsure (391),(393): unsure at all n locations; Clone ID: 24-LIB3058-016-Q1-K1-F11
ctgaattataaccctccccccaccagtcctaaggccataactctacccatcactttgctagcatttctcttagttctcatcagtcaattgtctctttgtatggggagatcttcagcctgccccagagcattgtccagatgcatgctggtgttgtgtacaaacccctccagggactaattttgcaagaaacatctcaaggcaacaaagagtgagatacttagtggaagggtgctctaggagggaaaggagcaaataaagaaacagctggattctcaagaggaaatcctttgattcctattatgaaggtaccttgttaaatgaaaaattccaggtgtaacacaagtgtacttttgctgcctcttatgtatgaaacacatacaaacactgactntntaaagtagtggga

SEQ ID NO: 3083 - DNA, 419 bp, Bos taurus
  unsure (366): Clone ID: 24-LIB3058-023-Q1-K1-F7
agaaggtatattaggggtcagaatgcagcactttacagaactggattttttttttaagtctaagcttccaggtctaggatattatgtagcacttgaaagttcccccttaaaaaaaaaaaaaaatatatatatatatatagatatcagaattatcaaataaaaatgtacttgtaagaaacacaaaatgtgtttcttctgaatgtttcaaatgtattctaaaagatggtttctatagataatattatggtagataactggatagtacattttttccactttctaaggctatacagtctaatctttctgaacgtttgggctgtttaacttctgtaattatatattatccagtcatcaatcatgctatanctctataaggccccctttatactgttcaatgtgtgtggggcaatgctgtatta

SEQ ID NO: 3084 - DNA, 425 bp, Bos taurus
  Clone ID: 24-LIB3058-026-Q1-K1-F11
cggacgcgtgggggattttatcagctctgcccatcagcttgtgctggaagcaaatttgttgagtcattagtcagtatatagcactgaactctctttaagagcaaatttctgatcagctgtgcttctgcaatttaaaatatttaaagggagataggtgtggatgggaggaggaaggctaaattgggccagggcgaaggaaatcggctctgtttaacttgtctgggacattaggccccatataactttagttttacagaagcagtaccacttttgatttacacgtgacacagaaaatgtatgaactgagacctcaaagggcagtttgtgcatagagtaatcggtatgtcctggctcacactttgtaagaatccccagaaaggctcttagaaatcagaaagatgatgtattcccctgccatgaaccct

SEQ ID NO: 3085 - DNA, 286 bp, Bos taurus
  Clone ID: 24-LIB3058-028-Q1-K1-F11
gttctagatcgcgagcggccgccctggtgtggaaatatgaatattaatataatggatgaataccctaaagggagggctgaaccttgaacaactgaaaactaaattctcatcacaaacataatacacactatattatatctcaatttttatctatacaatatgaatgatatacaccaatacatcattcaagttatcattacatgatctatataaatcaagttacaatgactctacaccttaaacttatatactactcttgcttcaaacatttttaaaatatccttat

SEQ ID NO: 3086 - DNA, 429 bp, Bos taurus
  Clone ID: 24-LIB3058-029-Q1-K1-F7
ctttattaaaggtatttcttattacctatcttctacttctataagtaaactctataaagagggttttttttgttgctgttttctctcaagactgtgccccagtgccttggaacagtatctgtctcttagtgggtacctaatcaacattttctgaatgatttggtcacctcctttgctttgggtactgtgcaaagtgctttatattttaatcaataagtgcatgaagtaagtattattattcgccttgtgtattgcctgataaaattgaggcatcgcacaaatcagataacttgcctgtaagtatcagagctgatacttgaacccaggtaattgtacaccttgctggattcatccttggccttggcacctctcagccaataaggctgtaatgccaagtgcatcaagttggactgtgtctctgttcttttt

SEQ ID NO: 3087 - DNA, 389 bp, Bos taurus
  Clone ID: 24-LIB3058-030-Q1-K1-F11
tgtcgagattgatctgataagaaaatgatataagaagcccagaaaatggtatccgccgtaaatctgagctgaagaaaaaacatactggcttaacctacttgtaaggagcaggtccagtgagtgccctgcattgggagaagcagactgtaagagatcccaaacaaggccataggccgagcagatagtgagctttaagtaaaaaatagtcattaatgtcagtctgaagctgagtccctaataacggagagatcttggcttgaagaacctaatggggagctgaataaaagcccatatttgacgggatgtcctttcaagtggttagaagtgtcgctaaagcccctcagtctgagtggaaaacaccttttaataaacatgagcccttagatgct

SEQ ID NO: 3088 - DNA, 144 bp, Bos taurus
  Clone ID: 24-LIB3058-031-Q1-K1-F7
gttctagatcgcgagcggccgaccttttttttatttttttttttttatcttatggtgggatcattaaagctatttattgaatagacattatagtaaacctatacgaaatatttataattagaatggtaattaaatatccatttt

SEQ ID NO: 3089 - DNA, 172 bp, Bos taurus
  Clone ID: 24-LIB3058-035-Q1-K1-F7
cccaacacggcccatcccaacccaacggagctcaactcaacccatcccagacccagcccagcccaccccaaaccagcctctcagctaacagcacccacatcatcataacacaaccaccacacttccatccccttggcagccccccaagtgtctgtgctttacagcatcacgc

SEQ ID NO: 3090 - DNA, 428 bp, Bos taurus
  Clone ID: 24-LIB3058-037-Q1-K1-F7
gaagcattcagttgttgccttatgccttatgtagctttcccaggtgaaagttgttgagataactctttcggataaaaagttaaattttgtacgttgtaagaaattaatgttaggagggtatatctgtatgacagaaaaggaggatttgccaaaaaagaaaacatagaatgtcttatttctacttaatgaaacgtgtgtatgggggtaactatatcacgacataatataaaacttggatgatgacttcctgattttctgaaaaatagatatatgatgactgcaggactttaatattcatcaaacatgctgccataacttagattattcttggtaaaatataaagtcatttatttctaattcttaaaagttatattatctattattagaagctgaatcttatgtaatcaattaaccacttttttattttg

SEQ ID NO: 3091 - DNA, 428 bp, Bos taurus
  Clone ID: 24-LIB3058-038-Q1-K1-F11
gttctagatcgcgagcggccgcccttttttttttttttttttttttttttttttttgttgggtttttttttttttttgattaatacagtattaatagggcttccttctgtaaagccctgaccctggcaagagaagggagtccctttggtccagggaatgagaaaacaggaatagaaatagctaaaaacatttcattgaaaacagggaaataagcaaaaggttcaagaactttaacacacattctttttcttttaaagcaagatttaaggaggagtttaaaagccataattctaccaaattttaagcttggaaatttgcctgtccttacttaataaggatcaaagctacctaaccccaaaatgcaaatccctgatctgtttcacatatctactagtttatccagacttcaataaaggaatccataaatt

SEQ ID NO: 3092 - DNA, 434 bp, Bos taurus
  Clone ID: 24-LIB3058-039-Q1-K1-F11
tctgtacagagccgtggggtgggtgttttaggctgtagaaactgaaggcccaggaaaccaaatgagtttcctgcagggtcagcagtaaaaggagagacacctgtggtttttcccaggagaggtgggagaatgaaagcgtttgatgctttaagatgatgcttgcagatgctaggttttctcttaagtttttcctgactccttggattcaccagtagatttttgtactcaaatacaagtctgaatgttttgtattctagcatatgtggacaattaatggtatatgctccttatttcactgagtaaagtcctattcttttctccatatttgcttgctggcaaaattgacatttacagcctgctatttgcttataattgagaatgtgtgcaaaaatatcaagctcgtttcctgtgcagtatgaaaacttttgtgacta

SEQ ID NO: 3093 - DNA, 183 bp, Bos taurus
  Clone ID: 24-LIB3058-039-Q1-K1-F7
cgggctcttgcgtcacgcggtcttcgattttgctgttgttcacgctgggactcgatgaggcagcctatccagagtttaaggtcacaacattcattctatcatccaacatgcacgactcttacacatgaacatctctatctgctttatccactatccctatggcctttcactgtgtggatcacc

SEQ ID NO: 3094 - DNA, 402 bp, Bos taurus
  Clone ID: 24-LIB3058-041-Q1-K1-F11
ggggctgtctgggggcagggtgcctggtgccagccagcctgcagagcccctgccccgcggagcgggcctgaggcactcacctgcatccggggcccccacagccatgggggcccccacggccactgcatcctggcctcctgccgtcccagtgggagcttggcggtcagggtgtcccctgcccgtcaccgcctcctctcagcctgggcctgagaactctgcgcgtcggtcgggaaggccgctcttctgggccggatgccatgggagccagcagaggcggtccgagaccccatcccgtctgtgacatgggggccagtctggaggccccgggggtccccaggggtgggtgcaggctgggaggtcaggtgtggggttgagctgtgtccccgaggggagggaacgatg

SEQ ID NO: 3095 - DNA, 170 bp, Bos taurus
  unsure (11),(97),(128): unsure at all n locations; Clone ID: 24-LIB3058-041-Q1-K1-F7
cacagagggcnaggccaagcccaacacaagcacccagccgcgagcaggagaacggcgacccccaccaagcagcccacacaacagggaacaggccaanaggagacaaacaaagaaagagggacagaacnaaaaaaaaaaaaaaaaagggcggccgaacaagaggacccaag

SEQ ID NO: 3096 - DNA, 392 bp, Bos taurus
  unsure (226): Clone ID: 24-LIB3058-042-Q1-K1-F11
ctggctttccactctagaataaatatgtactactttatttctttcaagagaaatcagatgtcttaacgaaacgtttatacaattttaactaaagtttactaagcagtagtaggtatactcagaaagaagaaaaagacatttgtttgataccccgtatagattggtaatgttcgtaacatgctatggaagcttgccaactctggtttacaaagtttccatcaaattntgtacatatgtcttatggctctttcccttaatttaataatggtcttctggcagaaggtaataacccaagatcaagggacccactttaattattggggggatcaatggattaagaaatggcaatggccgggggtttccctgagctactaatggtggtttaatggttg

SEQ ID NO: 3097 - DNA, 440 bp, Bos taurus
  Clone ID: 24-LIB3058-045-Q1-K1-F7
gggtccctacctataccactgccctgcttgctccctgcacagtggctccagtgagagggccattgaagggggaacattctccccctccaccacccatcactctcttccaactcttcaccccaaaagggaagtcaaagcacaggtccccgggacccacgatccatagactctgaaacacttgttttctaaccaagtgctgtggaacccctgtattccacagagctttgtcaggggctgctaaggtgggacgacggggtggaggcaaaggctatgtctccagccctccccaccccatcattcctacttccaccggaacaactcttcttttatctgtcttgcctatcaaggtttcaccttcaaacttctctcgaaaaagaacttcaaaccaccattctgaggcttgatcctagaccagcaagcacaggttctattcttgcttt

SEQ ID NO: 3098 - DNA, 372 bp, Bos taurus
  Clone ID: 24-LIB3058-047-Q1-K1-F11
ctggctcgtggcggttgagaggctcctttggctcacagggccagggttgagagtgacgggtcccaaagaaaaggcctagttagctgaactgccactgtgccgtcccaagaccaggatgggagcacgagggccttgagttgttgctggctaggccttgatgctctgatcaatggtctaaagcacacgctccgtgtgggtaccattctgatgactgctatggagactctataaacagccatacttcgaattcaacatccatgatgaaacccggaaccactggttgttagtgctggagtatcaaatttcatggaactattaaaagacttgtaaaagggacggcacgtatgaatgatccaggcttccacacacgta

SEQ ID NO: 3099 - DNA, 424 bp, Bos taurus
  Clone ID: 24-LIB3058-048-Q1-K1-F11
aggaactccagctgagaggaccaggattagtctacaggcagcgcagagaacagccccacgctcttccctctctgaaaaccccccagcaaaagcagaccgtgttgtacattcagactacacattttgtctccttttttaaaaactgaagtaggattttctctgtgtagaattctgttccttaggagctttgcttttcttgtttaaacatctcgtgagcaccccaggcctcatgaggtttgtgtaaggctcctgctgcacctcctaccccactggtcccctgggctgttggtgtcctgatgtattcacagggcaggggtgaaggctcctgccccaggtccatctctgaggctgctgggctgggctgggctggagccaggtccctgccctttgtggaaggtcacaggaaggtcccaggctgtgtgcc

SEQ ID NO: 3100 - DNA, 199 bp, Bos taurus
  Clone ID: 24-LIB3058-049-Q1-K1-F7
tttgattttaagagttaaaatgtaaactgcctcaaaatgatcaccctgcgattattcttatcttgcacaaaatttgtaatccattaatgtttgggaaatgaatagaaaatgaagccatttggttagatttttgcgttttcagcacaaatataaaatactcatttcctggtgcgtttgagactcttcactgctttatatt

SEQ ID NO: 3101 - DNA, 221 bp, Bos taurus
  unsure (11),(23),(35)...(37),(99),(109),(151),(153),(190): unsure at all n locations; Clone ID: 24-LIB3058-050-Q1-K1-F7
gacccacgcgnccgcggacgcgngggaagccaaannngagaaggaaaaaaggaaagccaaaagggacacgggagaaaagcctagggacaagagagcggngacaacaggngaagaatgagaaggcggaggagaaaggagcacggactgaagngnacccacagcactgcaggcaaaggaggaagaccacagncacaggaagagagcggcagggcaggggcacc

SEQ ID NO: 3102 - DNA, 335 bp, Bos taurus
  Clone ID: 24-LIB3058-051-Q1-K1-F7
cggacgcgtgggcatggagtctgagcatgccaggggctgacagcttaagtcaggaccctcagcggtgagcctgctgtggggacccagctgctcttgaacaagtggctgagctcctgtctggccttctctttttttttttttaaagtaacttgtgtgtatttctaactgatcctattgggggaaaaaaaaaaacccaaccctagtatttcagtaaaaatgcctgttgtaagatgaacctcctgtaacttctatctgatcttttttgaggctcagggagaaactagcatttttttttttttttcaaactactttttgtcactgtgacagttgttaat

SEQ ID NO: 3103 - DNA, 264 bp, Bos taurus
  Clone ID: 24-LIB3058-052-Q1-K1-F7
ggaccactgagctggagggatcaagcctgccctgaataggaaacttaaagagggtggatgggagctaggttcaagattcagagcccgaatgtacttcctgctctgtccccatagccaaccccaaactccttaaaaagaagaaattcttccttagaaaatacaaatgattcaagaagccaaccacttattgagacttgaggggtctcttagtggaacgggggaggggcgttactaccaaattcacttctattctggctttacctt

SEQ ID NO: 3104 - DNA, 336 bp, Bos taurus
  Clone ID: 24-LIB3058-056-Q1-K1-F11
ttagccttttcatctttgaggttcattctcaagctggtaaacattttgtcctgaaaatactccattcttcttagaggtcatataatattgaggtgaatattagaggtcaataatggtaagtctttgactattctgttcagccttggagcctgggaagtatatggtctccaagactgaatatggtaggttagtgtgtctatgggtgatgtattcctgaatacctggtctttagttaaactgaaatacctatttattaatgtgcctggattgatgactggaatagtggatctcagataatttgaacctaatcaattctgtgacaatgataaccagaac

SEQ ID NO: 3105 - DNA, 319 bp, Bos taurus
  Clone ID: 24-LIB3058-056-Q1-K1-F7
caaaattttaagtaatgtgcattgacaataagcttgatcatgggcatatgcagaatttccaacatatttttaaatacaaataaaactataatttaggattttttatcttaggtttcttaatttataagtagcaattattctgattattgtcagtctttttaagccatttaaaagaatacattcaaaaagccagttgagagcatggaaactgaagagttggcacattaataaatttgtattgctcacagagcactagggagtgtcctggggttaaatatataatcatgtataacttagctgcacagttgtatgtttgact

SEQ ID NO: 3106 - DNA, 223 bp, Bos taurus
  Clone ID: 24-LIB3058-058-Q1-K1-F7
ctgcactccgtccgattcccggtcgcccacgcgtcgcacctatgttacctaaaataagaaagtggtttcttaaatgtgtgatatggtggagggcatcgttaatcattctagatgcgggtaatctacagtcagactaccacgacatctaatgatatggggaggcatcgttatcattctagattgtcgggtaatctacttaagactctgtcagatcaaagctttt

SEQ ID NO: 3107 - DNA, 60 bp, Bos taurus
  Clone ID: 25-LIB3058-002-Q1-K1-G9
cggacgcgtgggcggacgcgtgggcggacgcgtgggcggacgcgtgggcggacgcgtggg

SEQ ID NO: 3108 - DNA, 300 bp, Bos taurus
  Clone ID: 25-LIB3058-005-Q1-K1-G1
ccttcccactggaacccacagcctcagctcgccactgtctcaggtggaggcactcttgtgcccctttgggggctggcttggggccaggaaggggccacgaggctgctctgggcccacaggggacattgaggccagttgtttgtcttctcattccttagttgcctcggaggaggggggtgtatatgttagagtagattctaagctgctgtaattaagagaccccgaaatacagtggtttcagcagacagagactcgcttctaacttactctctggagggcggtggtctggagggcagctct

SEQ ID NO: 3109 - DNA, 51 bp, Bos taurus
  Clone ID: 25-LIB3058-009-Q1-K1-G1
atcgcgagcggccgcccttttttttttttttttacattaaaagtgtataac

SEQ ID NO: 3110 - DNA, 130 bp, Bos taurus
  Clone ID: 25-LIB3058-012-Q1-K1-G1
ggctttaagacagagtgggaagctttgttggtgtctgcgggcatggccatggctgcgccagtcatctgcttctgcatcatccgtgattggtcagcagcattatcttggcccaaaatcagagagtagatgc

SEQ ID NO: 3111 - DNA, 384 bp, Bos taurus
  Clone ID: 25-LIB3058-013-Q1-K1-G1
gacagtgcgcaggggtgactacaggcgccctcgcataccgacagaacggatgcatagtggatcgtgaagaagcgatggtgtcagatggagctagctgccaggctctgggactaggtgaacccatgggcattgtgtgcaattcgtgcctgctggaatctagttaacgaagctctggtgacacttggggacagctacgtgagggcggacgcaactccgcgtcagggctgacccggcatgtaggtgggaagaggagcagccagagcgctaacctgcacaggacaggctctcgggtatctggctcttaaagtgaagagcctgtaaccggccttcaaacgtggcaccatgtgcacagaggctatggccatcaccagacaagcccgacag

SEQ ID NO: 3112 - DNA, 428 bp, Bos taurus
  Clone ID: 25-LIB3058-013-Q1-K1-G9
aaaaactacacaaaacctattcctggtgttctttctcaaaaagtctttgtcttgtcttaacctggaaataacttacaaaaataacgtaatgaagctaagagaacaaaattgtaaaggggtcaggggacaggaagatacgcaaagttatgattcgtccttttcttcccctccatgcagctgcattaaagaagtcatggactggcccttcttttaaggatgctcttcaccccacccttctacgtatttggaccttatttgatgtttcaaataattactaatttctatttttggttatctatgaaacaatgatggccaccatacaaaaagtctgttgattctacaaaattggccagttgatttgtatgcaccagaatttccaagctagcaattactatagtttatgtagtaatcaaattttctttgatcaa

SEQ ID NO: 3113 - DNA, 359 bp, Bos taurus
  Clone ID: 25-LIB3058-015-Q1-K1-G1
ttcgcttcaggggcttccacgttgttgctcatctgttaatcactaatgaaattcttcttacacttgggaaatctccagatgctttacagtgaataaagtgttaatttggtaaccatgttacaaaattctagacattaaaacctgtgttttggaaaaaggagaggaattaaataatggagtgttggtaaggctttcaggggctagagattgaggtgtgttttttttttttaagtactagaatatgttaatttttattaaaagtaaatttaaaatgttctaccttattattttatttggcatcttggaagaaaaaatggattaactccacgataaactgtttgattccagtaacaattgtc

SEQ ID NO: 3114 - DNA, 419 bp, Bos taurus
  Clone ID: 25-LIB3058-018-Q1-K1-G9
caagactgagtgttcctatttatctacaagactcaagagcccagaccaggagtcaggccagcagagtctacatgaacaccaggatgtgttagccacaactcctctctttagagagcaggcccactgacagacacagaaaacaaagggaagattcagatctatttccacttgataagatccagctcccctaagttgaaacacactaccacacatacacaccaaagatcaatgttccaggaatgctaaccccagtctgctccctccctctgcatttctccagcttctagtgcaggttgagccaccctgggcctctgtaggctcccagccatttcctgtaattgatgtttcagtcaatccagtatgtatttgatgcccatggtatgtccagtatggtccaggcactacattaaagaatcaga

SEQ ID NO: 3115 - DNA, 437 bp, Bos taurus
  Clone ID: 25-LIB3058-021-Q1-K1-G9
cggactcgtggggaaataattcatctttactaagtttatacaagaggaagaaaagtatagaatttttgagtaatgtgaattaataaagatgaaatctcatagtgctcttgcttcttaagaattaccaatgatcatcaaccttataatcttcagtgtctagttttacaataattcagagccttgtggcttttacaaactataaatattctgagtataaatgtacatgaaagtgaaaaaaaaaacacaaatcctcttgtgattaagcttatgaaggaaatgaacaacagggcctccactaggttcaacattttgataccttctgtaaattccccttacaatttttcaaggagccatttcttcaatgaagcataagcctaaaaaatataagaagagtttgtagttaataaagtctgtgtttataaaccccaagggaaaac

SEQ ID NO: 3116 - DNA, 383 bp, Bos taurus
  Clone ID: 25-LIB3058-022-Q1-K1-G1
cgggatgccaagaggggggcggctggcgggttgtagatggcggaattaactgtgatctctaatgggcctgtgtggctgctctggtccccaggtacgccatctctgactggtattttgatgccaaggagcgagcagcagccatagacaagtatcagctaggtacctgcttaccaaatggtgaccccgcctcttaagtccttctgttccatgtacttcattaggcctcaagctgtctcatcaatctctgatgaatctcatcatctctagatgaatctcaagtcactgaaccttgcagctcatattttcccatctttgcctactttccctagacagttgactcacctggtgttcccagcatgagccccatcatttctgatgctctt

SEQ ID NO: 3117 - DNA, 436 bp, Bos taurus
  Clone ID: 25-LIB3058-025-Q1-K1-G1
ggccccgcggttgccatagcgtcttaatcccgcagcgagagggaggcagccctgctaggcgccggctagtttcggcggcgacgcgcagcggcacagcggaaggaacccgcgcggcgggcctggggagccaggggcggagcgccagcgagcctggaaccacggaggcggcgggagcgggcccagcgtcttcctcccggttgctgagcttagctgctcttcccaagcccactcccacgctctagcaagcgtggaagaatggaggtgagccactcagtgaaggagcggaccatctccgagaacagcctgatcatcctgctgcagggcctccagggccaagtcaccaccgtggacctgcgggatgagagcgtggcccacggacgcatagacaacgttgatgctttcatgaacatccgcctggcccaggtcacctacacag

SEQ ID NO: 3118 - DNA, 119 bp, Bos taurus
  Clone ID: 25-LIB3058-026-Q1-K1-G1
tcggttctagatcgcgagcggtcgcccttttttttttttttttggtaataaccagaatatgaaagggttttgtaagaactgggaaaatctgtatgattctatataaaaatgactagaac

SEQ ID NO: 3119 - DNA, 280 bp, Bos taurus
  Clone ID: 25-LIB3058-028-Q1-K1-G1
ctcatttatatataccagtttcctaatgtaagatacttattcccccccccctccccggcagggaaaaaaacttgagagccaactgaactgtgaagtacaaagttacttatttttaatgtgattttatgatcctgagcacatacaaactgctgtagttgcgtgcacacattgtaatttaaagctaaagagtgcttgtcattggctggaaggcataaaccatcaagatccccctaaataatgttcatgctatgcatttcttactatggctgactactaggaa

SEQ ID NO: 3120 - DNA, 439 bp, Bos taurus
  Clone ID: 25-LIB3058-029-Q1-K1-G1
ctttattaaaggtatttcttattacctatcttctacttctataagtaaactgtataaagagggttttttttgttgttggtttctctcaagactgtgccccagtgccttggaacagtatctgtctcttagtgggtacctaatcaacattttctgaatgatttgggcacctcctttgctttgggtactgtgcaaagtgctttatattttaatcaataagtgcatgaagtaagtattattattcgccttgtgtattgcctgagaaaattgaggcatcgcataaatcagataacttgcctgtaagtatcagagctgaaacttgaacccaggtaattgtacaccttgctggattcatccttggccttggcacctctcagccataaaggctgtagtgccaagtgcattaagttgtactgtgtctcttgttttttttactcattct

SEQ ID NO: 3121 - DNA, 427 bp, Bos taurus
  Clone ID: 25-LIB3058-029-Q1-K1-G9
ccgggccggaaccacgcgtccgacccacgcggacgcttggacacagaagagtgattagaatgtggatttggcagacacactggctgaataggaatactagcctgcgacctaagggctgtgggaaatcgaatatgttattcagctctctgtccctcaattccctcattggcaagatggatacacactaacctacctcacaagatttatatgagggttatatgtatcaattatataatgattatatgtgcagaggacacacttaacatatgtaaatactagctaaatcactgtataccattcattgtagccagtgatgcactgactctgaattcctgactgcattgccttttagaacaagctataactgggataatttactaagttaagctctcatcctccaatggatcaaaaacttgagacttcatgt

SEQ ID NO: 3122 - DNA, 193 bp, Bos taurus
  Clone ID: 25-LIB3058-030-Q1-K1-G1
tcgcggacgcgtggggaactagttctagatcgcgagcggccgtccttttttttttttttgtgttttttttttttttttttttttggactcagaacaagtttattttgtgagtaaacatgtgatgcaatcatgcttgatcactaactataactgtgacttccgagtcttcaggatgatatgcataacaaaaaca

SEQ ID NO: 3123 - DNA, 230 bp, Bos taurus
  Clone ID: 25-LIB3058-033-Q1-K1-G9
catatatgttttccatttttcgttttgatttattcatgtgtatcacactggccagaggctataatctgcatgatgggtggccatgaattaatatgctaaagtactcctactgccaacgacatggactattcgcatgtataatctcagatgtctcatatgctgccattataataattactctcatgtgtctcaccttgagactctaatcatatcaatcgtgacaatattat

SEQ ID NO: 3124 - DNA, 56 bp, Bos taurus
  unsure (30): Clone ID: 25-LIB3058-035-Q1-K1-G9
ctagatcgcgagcggccgccctttttatantttatttttctgatacagagtataaa

SEQ ID NO: 3125 - DNA, 425 bp, Bos taurus
  Clone ID: 25-LIB3058-036-Q1-K1-G9
ggggtctttcattaaaaagtaattgatttgagccttagaaatttcaaagctctctatgtgtgagggagtagaagaaatgcattaacagctcttctgcaaacatctttatgctttttgtttctttgctatagctcaactttaagtcagaacagaaatttatgtactaaacagaatagattctttgtgctctaccatgctggctgaatcctgtctttctgatatggtcttcacccactaaactaggagacggcttctcatttctgatagagttctggttgtcaggcagatgatgtgggtcattaatttttctgcttcctcattagttacatagataatactaacctattccatgggggttatttaatgaattaaggatgataaaaaccttgaaaatgtttgtgcactctggattttaggcttaatat

SEQ ID NO: 3126 - DNA, 305 bp, Bos taurus
  Clone ID: 25-LIB3058-037-Q1-K1-G9
ccacacttgtgggtcttgggattggggcagggagcaggggctcaggcagtacagcttgcctgaatggcaaccaacactgacctctgtctgctgagaagaagtatgatgatggctgatgtgcgtgaagtcattcttgatctgtctgtgcagacagggtctgcttccagctgttggtgaagccagggaattttatgacccttatgcttttgtagccaccaattcaaaaaaaatcaagatacaaatattaagaatcactcccaggaaaattcaaattaaacattaagcttatctatcctttttctctt

SEQ ID NO: 3127 - DNA, 197 bp, Bos taurus
  Clone ID: 25-LIB3058-038-Q1-K1-G1
tcggcgatacctactctgtggccgctgagcttgtttcccacttacaggagcttccatgtcagaataatgtacttaggggaaaagcacgacccctaatgttaaataataacacacaactgcggaaactaagacaagattgtaaagcaactatatacttcaataaaaattgagtaacagcaaaaaagagaaaagaaaaa

SEQ ID NO: 3128 - DNA, 55 bp, Bos taurus
  unsure (31): Clone ID: 25-LIB3058-039-Q1-K1-G1
ccaggggtcacttggtcactgtccctgttcnactttaccagagggagaaggtggc

SEQ ID NO: 3129 - DNA, 176 bp, Bos taurus
  Clone ID: 25-LIB3058-040-Q1-K1-G1
cagacaatcatacgagaacaagccgagcatgtcacatacatgatactatacatattaaaccaacttcacataatcattaatgacactacatgacgataacacacacggttccgtgtgctgtatactttgcagaccaaacgaaacaccgaataaggaaaccgaatttccaaacatta

SEQ ID NO: 3130 - DNA, 420 bp, Bos taurus
  unsure (59): Clone ID: 25-LIB3058-041-Q1-K1-G1
cgggccgacccactcgttcgctggaccgaggggagctgggggcaggcattgctttcatnctgagctgccggaccttgaggggagagcctgggacagggtttgaggagcctgcagagaactgtgcgcctccccgggaggagcagccccctccagtgctgctttccccctccctccaatatgctggggctgagaccctggcatccaaagtgcaattccgggaccccaaatcccagcggacgcaccaggcccaggtggcgttccaagtgtgtgtgcgccctggctcctacaccccgggacccccttctgcggccctcagagagcctcccgatcctcacttcagcccagccgaacttgagtgggtgaccaaggagaaaggggccacgctcctctatgccctgctggtacgggtggagtgagggg

SEQ ID NO: 3131 - DNA, 78 bp, Bos taurus
  Clone ID: 25-LIB3058-043-Q1-K1-G9
ctggatctgacactagatttatgaacattgttttccagcctactgaaggaaaaataagacagaaaagccacaaggttg

SEQ ID NO: 3132 - DNA, 425 bp, Bos taurus
  Clone ID: 25-LIB3058-045-Q1-K1-G9
gtttgaaataggcaaacgttgactgctttgtgcttactgaggggggttcagttcactgctgccgaggtggcctgaccacaggagccgcggcacggggcccctggtgaggaagggccgggccagagccgaaccctgccagtgctgacccctgggcagccctgggctccaggctgctggtgtgctcgctgcactgtgcttgccctccctgccctgctttgctttgcacctgctgtgtgccccgccctgcgtgggccttacccgtctccacgcttcctatcctctaggcgaggggggcagcctgccaagcctcgatttccccccgagggggcagagctgcttcctgcctgcccgcagagcccacggggctgcaccttcagagctgcagacgtgggcagcccccactcaacccgcggtgtccccatgag

SEQ ID NO: 3133 - DNA, 329 bp, Bos taurus
  Clone ID: 25-LIB3058-047-Q1-K1-G1
gccagagaatgtggatttgaccccatattatctgcccgccttcccttctctataccttggcaccaaatccctgcaaagaaatagtgtccccttcagaatgaggctggtgctggtctctgtcaaaggaggcagaaagaagacacattgagatcagtgtctttctctccactctaaacttaccattaataccaccgtgctctgtaaaagctctgaggaaagggaaacccctatagatcgcacccgtgttactgtggaggcgcaaactgtgagttagaccccagcgctatttatgagatgtcgataggggttctttatgaggcgctgagtag

SEQ ID NO: 3134 - DNA, 405 bp, Bos taurus
  Clone ID: 25-LIB3058-048-Q1-K1-G1
tcgaggaaagataaatcttaggaacccttactttagctttttaaaacacagggtaccacttagccaccaggaagcccattaaaagacagggaggtccagtaatcagtcttttaggaaattggtaatgatgtcacctaaacttgaaacattaaaaaaaaaaaaaagtgttctcaactatgtaaaatctttctcctcctaccttctcaaatgtaatcctaggaattttgcctgtcaacaaagcatttctgggccagaaatactttctctctttatagcaaggcttcacattatattgagtgccacaggttccatcatttttaaaggacacagacataaatgataaataatagatataaaaatattacaatctaccacctcaaaaaatattggttatggagcttggag

SEQ ID NO: 3135 - DNA, 380 bp, Bos taurus
  Clone ID: 25-LIB3058-049-Q1-K1-G1
tcactttcgggtgaattggtaaaagcttttaaggagaaaattcatggaggtgtcttccggaccattaattttgaaaatgctttggggcagaaatgaatcaaaagagtatctggagtgcaggatggaaaggcaactgatggcacaggaacccctggaaaagctgggatttggagatttgattgatgggaagtcagacaaaaactgagctgtgccagggggaagcccgcagctgtgtggggtcgtccggacttcctgccgcccagcagcgtgttcatagcggataagcctggaaggggaaactggcttttgacgtatctgacttctttttttctggtgatgcctgaacaccacgtgtctttctgaaccgtattgggtgacac

SEQ ID NO: 3136 - DNA, 210 bp, Bos taurus
  Clone ID: 25-LIB3058-051-Q1-K1-G1
agtgaaatgctgtgaccgtgctcctcctttgtgtgtatctaaattgtataaggttgctgtgatcgagataaatagatgctaatttaaaaatgcagatgttttgcatttgatttctaccaagagttgaaatgttgagagatgctttaaaaaataataaagtgtcttccattgttaaaaaaaataaagataaaaaaaaaaaacaataataaa

SEQ ID NO: 3137 - DNA, 402 bp, Bos taurus
  Clone ID: 25-LIB3058-053-Q1-K1-G1
cgtgtctttataaggtacccacgaactttagtttttaacctctctgtcattgcgtgtaccttaacgcaattcttattgctccctattatgttgtgcttatttttccagcccttaaaagttcatatatttaaaaaggagatttgactgtggcctttgcgggcatcgtctgacttgagagtgtcataggccgcatcctcactttcttcaacatcgagcccctgggcttccccgcgagcacatcagtgcagctgtgggacccctcatcctctctagaagcaaagcttgctgttcaagccaacggcccaggcctgttcctttgcccagctgtaagcacccgggcacctcagagacaggtggctcaggaagaacctgcagaaggaagaacttaaaggatgcacagaa

SEQ ID NO: 3138 - DNA, 414 bp, Bos taurus
  Clone ID: 25-LIB3058-053-Q1-K1-G9
atgaagcgctggctgacgtccagctaggtttaccgtctaagcacgaagcagaactcagagattagctgaacgaatctgcctgacagacagacacaggagcccacatgctcctttcacacccgcatgtgcttatttgaagtcagattctaaattgcatttgaatttgtgcctctctgtttcccttgagccaaatccctcacctcatagttccctttggctcctgcagaattctgaggaataccaggtttcccccatccttttccataaaacatatttatgtatccatactaaagagtactttctgaggagtacttcatagtttttttttttaattgccttgtttgccttcagttttcttaattttcatggtttacatggatgtgtgtgtaggggctatatttgcgtatatacacg

SEQ ID NO: 3139 - DNA, 369 bp, Bos taurus
  Clone ID: 25-LIB3058-054-Q1-K1-G1
tcgattgaatcatcatgaagtgaactctactatcatccaaactacaaatgtttacagttttctcttctgatttcaactctacaagacatgtttttaaggacaaatagctaaaatggattattgaggtagttaatatttgaactgaatagttttttagttaactctaagaaaagatttgttgaaggttataattaaggtatttggtgttgagcataagagtattcttccttcagcaagcaaccatttgaaagcttagtttggaattagtggaaattgttcctttggtaacagaaataatatttaagatgtaaagctagctaataaaatgtcttagtttaagcataacatcatttattttttaataatttt

SEQ ID NO: 3140 - DNA, 101 bp, Bos taurus
  Clone ID: 25-LIB3058-057-Q1-K1-G9
atcgttagcggctctaactttctattatttttatttatatacttttttacattttaataaatttggtcttccactctttaggggcgtactcaaaattttat

SEQ ID NO: 3141 - DNA, 400 bp, Bos taurus
  Clone ID: 25-LIB3058-058-Q1-K1-G1
ggacagcaaggcagcaaagaagaagaaaaagaagaagaagcacaagaagaagcacaaggagtgagaacggagcgtagagagggtggttgagagaaggaatccggagcctgtgctttgaagccctggctcctagaaagactcagtagtaagaatatggcctcccaccctcttctctcccatgggagatggcgtccccttgtgtcacaggcaagtctggaagttaggtatcaaaagcatctgcctgaatgagttgttcccttatcactcttgggccctttgcaagtgacccctgcagctctcccattcattcacccaacttcattcggcgggaggtcgtattaccctcttcagctgccactgccagagccagattcccgtacaggagttcaggattgagcca

SEQ ID NO: 3142 - DNA, 398 bp, Bos taurus
  Clone ID: 26-LIB3058-001-Q1-K1-G5
tcgtttgaacatatttactattccattcagatttttctaaaagaagaattaaaaacatatatatatatacacatatccccccaaatttttcgacacagtttctataggaagccatgaatgatggcatgagtttgccatatcttacatgattttaaagaacactcaaaatattcaaggaactcttagagttttggtataatttcaatttaatattagcttcattaatgttctgcatggaaggattcttgttttctacatttcccatcactggcagaatgaaatccaagagaccaaacacttgcaagcatcatatttgagcacttttgtaaaaaagaagaaaaaaagctgagaaaaaaaagaaaaaagaaattgaaaattttaaaaaatatattatactt

SEQ ID NO: 3143 - DNA, 383 bp, Bos taurus
  Clone ID: 26-LIB3058-003-Q1-K1-G5
cccacgcgtccgcagagattcttagaagagttgctcattcacacccacgctcttgcccaaggccgacccacttagaaccaaagtcagcttctgttctggacagtgaaggaagtcgatttaccccaaggctgccatggcagagagtgagaggtcctggaacaagacctccccttccctccagcaccctaaagtctggggttctcatctccaagagtctgttttctgattttacccaagctggggtgcagtggcgggtaggcaggttagatttgaagggccccaagctgcgtatggattggtgctggcccttaatttggggcaaggggaccttaaaaaaggggtgccgttcatcttttggggtgggggccaagctttattattag

SEQ ID NO: 3144 - DNA, 163 bp, Bos taurus
  Clone ID: 26-LIB3058-003-Q1-K1-G9
ctaacatgtaaaggtatgttcactctcataggcgcctaattcagggtctgatagaggaaaagtgatgaaaggcgtggaccagggcctcaggtttgtaggattcatgctcaagtattcttgcaaccaaggtcggagagattgcatatagttggtttaagacaat

SEQ ID NO: 3145 - DNA, 449 bp, Bos taurus
  Clone ID: 26-LIB3058-004-Q1-K1-G5
gccaccttttgcactagaccatccccattattggtggtattggcctatgagttccacatgacaaattcaagtcttatttatttaatgtaggaatattttgtttaatatttaaataatgtttaatatatttccttataaactagtcttatactttatgatttgtttcccatgtatccatcctttactaactttttctttcaacagcagtgtgacaacagtccaaaagaaataactgattcatagaggaaaatttcataatttttaaggtagaaggaagtaaagtattaatttcttatctgccatgcagaattagacaaatagagtttgcttatgaaaggaaagaggcatactttttaattggtctacacagaaaagtaaaagtaaattattcatttaaataagattcattatctaatgaacattgaaggaaatattcttcctaaataaaa

SEQ ID NO: 3146 - DNA, 282 bp, Bos taurus
  Clone ID: 26-LIB3058-005-Q1-K1-G5
tggacgctggttttggttgcattaacttatatcttggttttaaacaaagcatgggggcgcacttggaactttacttgaccccaactctttctagcgctaacaaatttggcaagttactctacttgtgcctcaagtttctcaactgggaaatgggatgaaaatcagagttattaaaaggctgtaatgagttaatagatattaagagcattaaagtgccatgcactaccaagtgctatatataatttcgtaccataaattccaagtgtttttgcacgattaggg

SEQ ID NO: 3147 - DNA, 377 bp, Bos taurus
  Clone ID: 26-LIB3058-012-Q1-K1-G9
gtgacagcgaacgactcagccatacccccacccactccatctctagtcagtctgtttcacaggccccagatatttcttcagtgccctgaggctaccagctactggccgtgtgtatagctgagatgtgctctttgcagctattgcttgtggggaaaaagaaggcataaggactatgtagctgtataggatgctccaaaagtgactcagaaaaagacctaatatactctgtacccaaggcgctacttgttaagcgggttggcattgatgtgccctgtcgtatgaatatcacgtttgactcaagcactgataaaagcttttctgactacagctagggctgcaggacacatattacctgtgaaactttcggtctgtctagc

SEQ ID NO: 3148 - DNA, 421 bp, Bos taurus
  Clone ID: 26-LIB3058-013-Q1-K1-G5
ggctgtgcctgcaggcactggtgggctggatctgtaaatgcgagcagaggcagccccctggcaaaatggaggggtgtggcattggacccatgaagggaaaatctggccctagacctgccccatgttaaccactagagaaattttactttgtatccttttgtgatgcctgtcaattttaacagatcaaagcattagaccaaaatactcaggagataattctctaaatatccctgatattctagttatgtcaataggatgggaaagctttcgcttttgtttgataactaaacacaaccatcttgcaaactggttatcactgaaagtcttcccttataattgcacgtgcatcttgaatttcagaaaacatgaattcacaatatggtagcatgacatgctctgtgttgaaacactttttgtaccg

SEQ ID NO: 3149 - DNA, 442 bp, Bos taurus
  Clone ID: 26-LIB3058-016-Q1-K1-G9
gatggaagaggtttctaaggtttactacatttagtcagttaactgtgttcactcaatgaaagatcaatacatgtaagcagttattaataaactgttgcacatggataaagacagactaattggaaaattatgttttctgcagtgttaccagaatcaaggttctgtttattccccacaagacttgtattgaaaaataagatattatattttgtttgtatatatttagtgttttgtataataccaggaactgctaactaaatttactcaacttagggcattaaatatcatgtacttcatagtttgagactgttcactcaaatagggcagagtactattctatctagacgtgtaagtgttttttttaaatcacatggaacggtttttttttttttatactaaaaagtggagggagatttgtttaaacaagtatttctaaaagaaa

SEQ ID NO: 3150 - DNA, 204 bp, Bos taurus
  Clone ID: 26-LIB3058-017-Q1-K1-G5
gttccagagtgtcagagcagtagccattctctcctctggaacagcagtgtatctgttcaggtggggtcatagaaacctctgttaggatacggtttaaaacaccggcttccgggagatcctgtggttgcagaatggtctctcgagtttatctgcttccttactttctgcagagcctcagacagatgtgtgaaactggctctgatt

SEQ ID NO: 3151 - DNA, 307 bp, Bos taurus
  Clone ID: 26-LIB3058-017-Q1-K1-G9
gcgtgggacctcctcgggccgggcttgtttcttggtagctgccgggcgccggcgccgaagagaatgatggattttgagaatcttttctccaaacccccaaacccggctcttggcaagaagtccaccacgaattctgaccaaaggcactctagaagctctacatctccgaagatttgcaacataggaaatcaagaagtaaggactatgatgcatatactgatgatgacatctgcaatcaggagccagaggataatttcgctaaggagcttcagcagtacttaccagctaaagagatggcaagtgttac

SEQ ID NO: 3152 - DNA, 306 bp, Bos taurus
  Clone ID: 26-LIB3058-019-Q1-K1-G5
tcgatataatggaacaaatacactatggtgcatgcaaaagtatgtgagcaatgtcagcgacggggttgctatacttggagtctaatgctatgcattataaaacactatcacatgtgaagactctagatggtgcttattgtagtggacgtggattaaactgtctagcgatagaatataagtagcattctaaaagaaatgatgatatatgatatgattgattagctaatgctatgatgatgacagtacagcgctatgtctacgtgtcaaatcaacacattatatgccttacatatacacagtgttaag

SEQ ID NO: 3153 - DNA, 329 bp, Bos taurus
  Clone ID: 26-LIB3058-020-Q1-K1-G5
acgtgataattcattattgtgtgttagcataatactctacattaggattccaggatgtggatttatgtttaaaactgtaaacactcacattgggtagggggctgctatactgtggtcagccaagcacagttgaactcaggggctttgtgcatgaaaggaagcactctcgagagcacagacatggaatatggagggactcaagttgccccccaaaaaactaacaaagcaagcaaagagctttgctcctttgcagcgttttaagagtaagaattttaatataatttttgaaatcagtggtctacggtgtaaacattgaatgtattcattct

SEQ ID NO: 3154 - DNA, 383 bp, Bos taurus
  Clone ID: 26-LIB3058-020-Q1-K1-G9
cgacccacgcgtgcgactaaacccaggttgccgtctgtggctcgcggtactgcggttgacggctctgtacctatcatcttgagatcatggtccagccacggaaaccacgatgtattcgtctgcctgctagatgcgtatgctgaatccggatgcgaaggcctgagacagtttctgtggaacagtagccctacaggctaccttggggatttacaaggttccctgaataccgcatggcctgacccgctgcatcacagcgtcacagcctgcgtaaaggacgtcactgacagctgtgaatatttagatgatggtataccattactggacacttgcacattggaccgatatctcgttcacatgatcatactgatgaactttaaagtgat

SEQ ID NO: 3155 - DNA, 462 bp, Bos taurus
  Clone ID: 26-LIB3058-021-Q1-K1-G5
tggaaacacagaactaaacttttatttatatgttgtggggactgcataacttacccaagaagtgactgtgggtttggaagtggcctgcagtggcagaggctccctggggttcgggagctgccattgtccacgctgggccatcccacacccttcccttccccaaccccccacgcccagccccacccccggagccctcggccagagccctgcccgactccagaagaacaccctcacctggccgggcttccagagaccctcgaaatctccgagaagataaacagctgctacctcttagtatgattcggattttattttgcccttaactgattgtaatgtgctacaagggatttcagcggactgcgcgaccttcccggctgttgtgttttgatgtcccaacctagaaaccttagctgtcctttctggagttaacctttcacacctttccagtgggatcatgccccc

SEQ ID NO: 3156 - DNA, 350 bp, Bos taurus
  Clone ID: 26-LIB3058-022-Q1-K1-G5
gattctggcaacagcttgacctgacacccctgaccataacctccaagcaggcctggaaagagtagaagacagatcacagcctgtagtcacacactctttcttaagaagtagagaacatgagcagggtccagtgctctggaacattcaaggatgtgcctgaggacttcagccatgaggtgtggaagatactggtgccatctgagatggccctggactgcgtcttcatgttggagaactacttgatcttattgtcagtagttctcgcagatcaaaccgtgtcagatgctcaagaccggccatcccgcgatttcccgtctacagggtatcagtctggcacaccaaatacactc

SEQ ID NO: 3157 - DNA, 320 bp, Bos taurus
  Clone ID: 26-LIB3058-024-Q1-K1-G5
gtgtatacttttccatcctgtaagactttgaactcaagtctagaatgatggtcccctaaccatcacgtacttatgaaaggcagttgattgaggaggggatgaggtcatgaagatcctgatattccaaacctaaatgctactccctacattcatgtatagaatgaactccagtatgaaggaatggacaggaaatcctaagcacagctgcattccatcttatcactgacagtaagccacaactaacttactgagctgaacttactatctttgacatcgattacttcaagaactgagccaactttttctgccgacctctctgt

SEQ ID NO: 3158 - DNA, 422 bp, Bos taurus
  Clone ID: 26-LIB3058-025-Q1-K1-G5
cgcaattgtgccaagattccaactcttccttccctgtgatgttgcccgtgatgttctgtgcctgggtatctgctgatatgcttcaagtgacagtagaattcaaaccaaaaatatgaatacaatgtcccacctgattttaaaggattgggtttagagtgtgcatcaggaaatattaatatacacgtgctttgtgtgaatgtcttgtgggggtgttattagcttgttttgggggcttgtttttgatttttgactagtgccaaagtagtgtcttctctctacattttctacctaacattttctagcttgttctaatatatcaagggaagaagtaccaaagttcacgtaggaactaatgccagcacagatcattgattttcagacacatagatgtgtgaaaataacattgtttgacttcattgttt

SEQ ID NO: 3159 - DNA, 308 bp, Bos taurus
  Clone ID: 26-LIB3058-031-Q1-K1-G5
ggagggcttgcctttgggttgggggccagctcacaagtcctacacgagccctgcacagctagccgctgaggcgacgccggccagagcaccgctgaccgggggtgggcagcggcccccacaccttcagccacccagcactgccgggaatgcctcccacagctgtcacggggagtgggaaggccgtggtccttcgcccgattccaggtgtgacctttgaaaggaggcggtgagcatgcaccacttgactgcagaatcacatccaatctccggctcccaagcacctgccctgggactggggttggaggaag

SEQ ID NO: 3160 - DNA, 404 bp, Bos taurus
  unsure (301): Clone ID: 26-LIB3058-034-Q1-K1-G5
gatcccgacggctttctaggctgagcgctcagcctcacacccctgccccgacccactccagtctccatctcacccaagacccccaagagtctgggagctggaccaggaacgccctcaggcctcgtaacagattctaatgagggggcattcctactcacctttcccccaatatacacgcctctggccccccgggcacatcctgtactccctgacaaaggagtatggggtggaacagggcttattcctttcaccccaggaggccaacccctccctgccccggccaacccagtctaggacattntgggggaagaaaatgggggcttcccatcttccctagatcctcttcagttcagccagatatttcctatatcaggggtttattctgcctgttcattttggtgggt

SEQ ID NO: 3161 - DNA, 440 bp, Bos taurus
  Clone ID: 26-LIB3058-035-Q1-K1-G5
gaagaaagaagggggggaggtgacgtgctgagagctggacccacatgcagggcgcgatgagcggccggagacccgcttctgtagggccagtgggagtgcggggcaggtgggtgttttccgtgccttttggtccctgtgtgagaatcagtggcgcggtggctttgtgcagtttatgcagtgatttggaaaagggaagtttctatttattatttgaatacagggtaagactcccctgccttttagaggtcatactctgctccaccaactccaggctgatttctaggtattccttccgtgcacctgagtgtatttaacgccaaggttgagaagggggagaaggttatactcagataaagctggtcatatgagagtgtaatgtattacctcaacttgtgacttattctataacacttaataactagtttaatggttatctcatc

SEQ ID NO: 3162 - DNA, 431 bp, Bos taurus
  Clone ID: 26-LIB3058-036-Q1-K1-G5
gccgaaggcttttgaaagacggggattctattatgagagagaagcaaagcttagaaggttgaatatcccagctgcgaggaaggggagctgacatgtacacaggacccactaaaggctaaagaatgaggggtacagagtgttcctgatgatggggtgcggggggcaggtggaagcaggaatattagttgaaagtttgtgttagagccacagacccctctctcaggctgtcggcagcgtactcccccaccagctgctttcctacaggcagtgttgaaccagggcagccgagggtgagggaggctctgtactgagagcaggagaattcagtgaaagtttgtgtgctgaacagagagaccctgtcccgctactcccacagtgtggctgtctggcttctacccatcctccaggcagggttttgaagaacttctcta

SEQ ID NO: 3163 - DNA, 416 bp, Bos taurus
  Clone ID: 26-LIB3058-038-Q1-K1-G9
cggacgcgtgggggggcagctctcccctttttttcactgcccagtgatgttggtcattttcataaatgattcatgttcagcctgagtcctggtgtgacctggctcttcctaaccctgttttcccttttttcctcccttcactgctctcctcctccgccacctccaggactgccgccttgctttattactcgaggtaccttctctatgcccgcgtctgtgcgcgtcccctgtctggggctgggccagtgaggccgcagcctctgctgacgtgtgactggccttcctacttggccaccatcggggtcccgcgagctgcctttagtaccagggtgtaggcttggctgggttgggggggggtcctgtctccagacactggcctaactggcccccaggtcctgaagcttgtctgtctgctg

SEQ ID NO: 3164 - DNA, 293 bp, Bos taurus
  Clone ID: 26-LIB3058-039-Q1-K1-G5
gcgccgggcatgtctcgggagccggagttgcccgggccgcgggggctctgcgacgcatggacggcggcggcggcgcccggagagcagggggaggagaaggcgcaggcggcggaggaggcggcgacctgcagcgagaggcaccggcggcgcgaggggacggccggctgccggctaggctccggcccctctacttttccgtagcctccccgcctcagcagcacggccgccgcctgcggcggcgtcggcacggccacggccgccggccgcccggccgccgctgagcgcaacgcacg

SEQ ID NO: 3165 - DNA, 426 bp, Bos taurus
  Clone ID: 26-LIB3058-041-Q1-K1-G9
ttaccggcccgacccactcgttcgcgggcgcgtgggggctcatgtactctgttattcaagaacccatgcttaatgctgcacaggagcagtttggtggtaacccatttgcctccgtggggagcagttcctcttctggagaaggcacacaaccttcccgcacagaaaatcgtgatccactacccaatccctgggcgccaccaccggctacccagagttctgcgaccactagcacaacaactagcagtggcagtggatctggcagtagctccagcagtgctaccggaaacacagtggctgcagccaattatgtcgccagtatcttcagcaccccaggaatgcagagcttgctgcaacagataacggaaaacccccagctgatccaaaatatgctgtctgcaccgtatatgagaagcatgatgcagtctc

SEQ ID NO: 3166 - DNA, 413 bp, Bos taurus
  Clone ID: 26-LIB3058-042-Q1-K1-G5
gcgagctaccaaaggacgtcttgatctaccgagagagatttccaaccgatcaacctcatcgtcagagagagccggctccccggcgcagtgcgtcacgcctgtgcagacggtcgtgtgatgcgccgcttgatggggcgcggtcgccgtgaactctgatgacagtggcagcttcatgaggaggagggcttctgaacatagaacccgtctgggagagaacttcagtcactttatttatttcagatctctctaggatgagttcagaactgtagcggtgcaggtggtttaagggaaataacctcacgtgtaattacatgattacaacactaatcttctaagtcgcccaaagaatattaaaatgcttgaatcctggctccacagtgggaacaagtttctgattttcaaaggaaaatact

SEQ ID NO: 3167 - DNA, 438 bp, Bos taurus
  unsure (402): Clone ID: 26-LIB3058-045-Q1-K1-G5
ctgcaatatgcaattctaaaaaaataattttctcttgccaaaacccccaaatatgtgatgcacatctaggagaaaaaacagggacaaaataaacaacaaaataagataaccaaatttctccaatatctaaaaactgtgttcttacagttgctttatgtctacagcttcactattgatgttttcagaaatacttacataacgtatcctcttatttcagttcactgctcagagaaacgtgccctgactaccctatctaaatggtgccttcttcctgttactttttaaccctttactctgatttaatactctccatgccttttccagttttcctccagtttaggagtggggcaccctgcttcctgcccatgcagtgctaagtccctttggctgtgactgactctntgtgaccttatggactacgtcccgccaggctcctct

SEQ ID NO: 3168 - DNA, 265 bp, Bos taurus
  unsure (10),(22),(35),(42),(61)...(62),(99),(137): unsure at all n locations; Clone ID: 26-LIB3058-050-Q1-K1-G5
acccacgcgnccggcaaaaggnaagagatagggancagaccngccagaaaacacacagggnngcccagaaaaaaagcagaaagaagcgcaaggacacgnatgagaagcaacagggggaggctgccaaggcagagagngaagaggagaacaagagcaaacgagaagacaagaccaagagagaaggagaagagcggccggaggaggcagaaacaagaaacggccaaaagaaaggcaagccgaaggagacagaagaaggcgagaaaga

SEQ ID NO: 3169 - DNA, 198 bp, Bos taurus
  Clone ID: 26-LIB3058-051-Q1-K1-G5
atcgcgagcggccgtcctttttttttttttattttaattgttttttgttgttgtgatcgcttttatttttaagtcataattaaatgcatttgtttttcattgggggactaattctatgtgaaccatttgagttccattgttagatagcatagacttatgaattgtgataataaaaaagatgaacatttaaaaataacc

SEQ ID NO: 3170 - DNA, 383 bp, Bos taurus
  Clone ID: 26-LIB3058-052-Q1-K1-G5
gtaagtaggaagtgctttattagatttgtccatttcctactccttaaaaaaaaaaaaaatgtacctgagtacttgaattaagttgagtcttttaaaaagtttgaagtttacccaactaggaagtacaaggttttagtgtagattttgtattttttgtccttagtgaggagaacttaatgtgatattagagtatttttactgtgatttggagctaatttatttctgttatggtgtatattgctagttttatcctttactccaaagattcagttctttttttcagaaaagaagcatgtgaggatttagctaattagatttgtgatttcgattatcaggataccttagtgttagcaggaacttaattagaaacttggaaagacagg

SEQ ID NO: 3171 - DNA, 319 bp, Bos taurus
  Clone ID: 26-LIB3058-053-Q1-K1-G5
ctctgaagtggattcagggtcatttaataacctggtattccctaggcattccccgcccaggctggaggaagttttcttgtcaggggccacagatgcagaagacctccaggccctggactattttaggcacagctgttttcattcatcagcctggaagtccagggagtgaaaacctgcccactcggtcctctccctctggggagggggatagcatagggtggggctgcaaagctgggatacatcattctggcctccgcacccctccctttctcaatccgtggggaggcagatgacaggaaatgactgccattggatgtgg

SEQ ID NO: 3172 - DNA, 424 bp, Bos taurus
  Clone ID: 26-LIB3058-054-Q1-K1-G5
ggaatggttaatatgactagactaaataaagagctgctgacaaattgaagaaaatgttttctttctgggaagctggacaccaattagtatgtcattctgcatcattctctttaaattacagggtgtttctaattggctgggctctttacctggctcatcacataccactactctctcttattttgtcatcttccttttttttcacccccttgtttttaaattaaaaacaaaatatagcaaaatgaaattgaacatgccattgggaatcagaagttgagatgatttaattctcgttaaaatcattgcactttttgaaaaattgctttgagatctggtaggtcaggtacatattttaataatttcccatatgtttattaattaaagatgaggattttcataatttcattttccttgaaaggattct

SEQ ID NO: 3173 - DNA, 126 bp, Bos taurus
  Clone ID: 26-LIB3058-054-Q1-K1-G9
aaaattattggattatatactgagacattcacttcaactcagataagaggttctaattcctaccatgagttttagaaaacagagctatagtcctaaagtcctggtatgaattagaacctccaatgt

SEQ ID NO: 3174 - DNA, 80 bp, Bos taurus
  Clone ID: 26-LIB3058-057-Q1-K1-G5
tgtgcacaaagatcgccgtgatctttctttacacctgcctgacacatacaatgagggatagatttccgcgtggtggtgct

SEQ ID NO: 3175 - DNA, 450 bp, Bos taurus
  Clone ID: 26-LIB3058-058-Q1-K1-G5
ctagaatatacaggatccatcttctcctgtgacaaatattaaatataattaataagaggagaactttcaatctcttaaggatcgagattcctgaagtaaagtctattcatatagttcatctgtatggtggggaaaacctgaaaataatctttctttaaatttaaaatactggatttcatagctatacagctaataaagaaaatatgggtacattactcaaaatcagtccaagaatttaaatttaggaccaccaaaaatataacaaataaacaaaggtcactatactttattaggaaaacttcagtgtacaggtgtctataacatcattcctttaacatctcaatgagagaaattttagtattttaacttggatttttcttcccaaaaacattttgatgagggtaaactttgtaattagtagcctaggaatttaattatgtcattactcct

SEQ ID NO: 3176 - DNA, 370 bp, Bos taurus
  Clone ID: 27-LIB3058-001-Q1-K1-G3
gttggcggcggcctggagacgtttacatgaagtagaaggcagatctggggactaggggaggcaccaagtcactggaaattagaggacaaatagtattggagggagaagggaatgaggcagagattgaggaagctgagaacatagtttaagagatgtaggaggcacctcataagaacgggtggaggtttgagaaaaggaaaaagagttgtaacaaaggtggggggaaatcttccagggatggttgagggaaatgggaaatgactaagtgaaaagttgagggaaattaggagaagaactagggaaagatttgggaggagtaaatccttatctaagggtctgtgagaactagattattgaaagaagcttgggg

SEQ ID NO: 3177 - DNA, 335 bp, Bos taurus
  Clone ID: 27-LIB3058-006-Q1-K1-G11
cgagcggccgcccttttttttttttttattttttttggatacatgtcctttatcgaggatgacagaccaaaacaaaaccaaaaaaccccaaacatgtaaaaacccagggtgctagaaatacaaactcaactcgttcaaattcaagctcatccagaccctggtcacaagccctcgtgaggtgcatgtgagcaccaagtcagggacgggggacaggagtgagccaaggaagggtgggcagggggccctaataggccccctagtgaccacccccacactggcaccttcacctttccagtgacgggggagagctaccgggccttgtccctagatcgcga

SEQ ID NO: 3178 - DNA, 200 bp, Bos taurus
  Clone ID: 27-LIB3058-007-Q1-K1-G11
ttctagatcgcgagcggccgccctttttttatcttcaatggatcatttttttcgaaaatcacagaacatttttaatgaaaaaggccctttacatcccttttggctgaaatccactgcaataattttgagactgttactgacatttaaacactcctagatattcctctcctggagggaggctgatcatccaacacagtctt

SEQ ID NO: 3179 - DNA, 274 bp, Bos taurus
  Clone ID: 27-LIB3058-007-Q1-K1-G3
gtgaggagtttgtcaaggtcatggacaaactgaacctgcctaaacctcagcagatagactttgctgttccagctaacatgcgctgtgggatccagacacccccttcctgaccgaccctgactctcaggcgctcacagctcacatccgttaagaatgcactaggtggggtgaggggagccgtgccatcactggggcctctctcctcttcccctcccttactagcctagccccctcaagcttcttaaataaacatctttttttttccctcctctgg

SEQ ID NO: 3180 - DNA, 396 bp, Bos taurus
  unsure (350): Clone ID: 27-LIB3058-008-Q1-K1-G3
gtttgatccccgtggctgagcgtgtaggcagggcttcctctctgcagttcagtgtagatgtacgatccctttggtcctaccctggcccactccttcattcacatcactcacttggtccctgtagacatgtcatgtgcaactctttccagaccccaagtttgatgtctaaaggtcctgctgttgagagagacagaaacagagacctcaattctctgttccctgcctgtttatccactccagatttaaactcaaacgaagctggcaaacctgctgagacactgctggtcagtggaaaccgggtcaggtcaggagacttaattgaaatttggcattttttaaatcggcatgtngcctgctgtgttaacagttccttcgtcaccgaagcttgtctacaga

SEQ ID NO: 3181 - DNA, 343 bp, Bos taurus
  Clone ID: 27-LIB3058-009-Q1-K1-G11
ctcttcctttttgtttggcttggtgggcatttatcctgttcctttacctgctgggtagtcctgtgccttttcatcgtggttatattgctgtgtttggggtggcctttctgtattttggctgtttgtggagttctttttattgtagagtttcctcactgtgggtgggattgtatgggtggcttgtcaaggtttcctggttaaggaagcttgtgtaggtgttctggtgggtggagctgggtttcttttctctggggtgcaatgtattgtccagttatgaattatgagatgtcaatgggtttggtgtgactttggggagcctgtatattgaagcttagggctatct

SEQ ID NO: 3182 - DNA, 370 bp, Bos taurus
  Clone ID: 27-LIB3058-012-Q1-K1-G3
cgtccgaattccggtcgaccagcctcgcctgaccccgagatgggagtcgaagactgagaaggggcctagccccacccttccttgatgtccctgcaatgcccagggactgggctggggcattcctgcacattgacagatgagggaaggcatcgggaagggacattgggccgaagccccttctaccttccagatgtcagtgtccgggacccccggcgatagatggcttgggggagttggaagcttcctggcagccgtgcccaacttggtcccttgaacgcggccccccctattccctgccaagacaaggatgaccgacagtgtatctggaaggtctgggaatcaaggtggtaatggaattattactatgaat

SEQ ID NO: 3183 - DNA, 423 bp, Bos taurus
  unsure (377),(379): unsure at all n locations; Clone ID: 27-LIB3058-014-Q1-K1-G3
tagctccctgctttccagctctgggatctcatacgtgtcgctgagtttttctgtgcctctgagccctcgtctgtgaaaacaggaaaagttatcctcaaaacttgtttggatgattatatgttaaaatacataaagcagatggtcctgaaatttagttaccttgaatctagaaaagcacaatgaaaaagagggaaaaaagacatttcagaacacatacacattttgttttgcatgatcactatactatgagaacaagcagatgggggaagtggggaattccttgtaaaagaacattaagtagatagtttgggcaactttgtcaggaaatacctgaatgcttatcttttctgagaccatccctctctcccttcgctctntntttttttaattaattaatttttttattgaaggataattgcttta

SEQ ID NO: 3184 - DNA, 401 bp, Bos taurus
  Clone ID: 27-LIB3058-015-Q1-K1-G3
atcgcgagcggccgccctttttttttttttttttttttttttttttttttttttttttttttttttttttttaataggctcaaacattgttaataaaaacatttattttgcattttatacagaacaacctgaagtctgcattatgacagttacccaagggtttacagacagttttatccattttaacagcatggttctggggattagggatccacacaaacacaggcaggagttgcaagggaggaaggggggcacaccaggagtgtattttaaatccttttttaaaaaggcagtaaaaccttttgagtcacttgaaacctgtgcatttggggattctaaaacaaccggtgtcctgggagtttttgggaaagggccaggataagacccttgataaataaagg

SEQ ID NO: 3185 - DNA, 200 bp, Bos taurus
  Clone ID: 27-LIB3058-017-Q1-K1-G3
gcaataacctgtaagtgctatgtgctctggaaggaagtcaaagtgtattttcctggtgggctttgatttgtttttcttgcgtgtttaataaattaaagctattgattatgtacacaatatacttttggaaaatttctttatgttcaccttaaatgtgaaaataaatcctattttgtataaaacaaaaatttgaaatagaa

SEQ ID NO: 3186 - DNA, 164 bp, Bos taurus
  Clone ID: 27-LIB3058-018-Q1-K1-G11
actatatcgcgagcgggcgagtcttcttttaacctgacatccacgcctaccggagtcagtgacgctattacgatacccaatactcgatatccacatgcccacctcttgtcaaaaagtcctacactacacactgaccaaatacatctctagcctctctacgatac

SEQ ID NO: 3187 - DNA, 51 bp, Bos taurus
  Clone ID: 27-LIB3058-019-Q1-K1-G3
gtctgtagctactgttacacgtttgtttttgtattaaaagactcatcagtc

SEQ ID NO: 3188 - DNA, 223 bp, Bos taurus
  Clone ID: 27-LIB3058-021-Q1-K1-G11
tcgggccgtcctttttaaataattcatatttactatttttattcaataggaagaaaagtatagggtgtgtgagtcatgtgtattagtaaagatgaaatctcatagtatctctagcttcttaagattcaccaatgatcatcaaaccttataatcattcagtgtctagctttacaattgattcagagcctatgggcttatacaaactatgtatattcagagtata

SEQ ID NO: 3189 - DNA, 476 bp, Bos taurus
  Clone ID: 27-LIB3058-022-Q1-K1-G3
tcgcggacacgtggagggcatcagaaagaggctggatctttaaaaggcagctttccaactttgcacacggacaggtaacaggaaggtacagcaaaaaccctctcatctgaaacactgtccacagaaacaaaacctgtaaacgtgactaaatggctgcacaattttgatgctctctgcaagttacctagaagtgctttgtttttttcttatacttgaaatagcttttacaatattattttgatggctttcttttctctcttatggtgggcgatagagaaagtggatgatgggatttaagcaagtttgaggggagaaaagggaggatatggcattgtctttttttttttttcccttaaatatagaggtttaatcagactcccatctggtgaaattgctcctcatatgactggttttacatggacacagaaactaagcactttaaaggtgcacttgcatggcaagctgggccccccttt

SEQ ID NO: 3190 - DNA, 421 bp, Bos taurus
  unsure (373)...(374): unsure at all n locations; Clone ID: 27-LIB3058-023-Q1-K1-G3
gaaatgtgttatgaagggccaactgaagtacaggaagaataatcaggcaagaactttgataagatcaatgccacattcacttttctattgtgagatccaagtctctctccccacaattaatccctaatgtaacattccccaataatttgggacaacctgaaacatacccatacattaaaaatgcccctggagaaaagtaccttctaattcatagcaggaccactttaaaaatttgttatctttttctttcagagaggtaacaaatgaatccattactcttcttattaacaacttagcacaaatgatttttatcagattagacctggtcatctatggaactgtagaaaatttgacatagaaaggaactctcttnngactgcccttttttggaggaagagaggagtgtctgaggtgtggacac

SEQ ID NO: 3191 - DNA, 422 bp, Bos taurus
  Clone ID: 27-LIB3058-024-Q1-K1-G3
aagttggaccccaccatacatggccgctttgcctgaagtagacaaccccagctgcctgaaagaggactcattgcttccaggagggattcctactttgagtagcgagctgtcatcttggggatcaccacatgagggtgccatgggaccacagctgcctctccttcccactcaggaagtctaggtcccatggggtagcccagccaaagagaaagaagagtggccagcagcggggaaaggggaaagttctttcccagcaagagaagagaatggcacatagatcccaatggaaataaaggttttatggcatgggtgaaggaagctggcattgggttcctcttcttctggcttgtcccttagctgatctgtttggaggatctgctgcttcgagttgtgaagaaccacgcacatctgaaaagttctct

SEQ ID NO: 3192 - DNA, 282 bp, Bos taurus
  Clone ID: 27-LIB3058-025-Q1-K1-G3
gcgtgtggacacacgcgtccacgcaaatctgccaagatttcaacttctttcttacctgagatgtttcccgttatgttctgtgcctgggtatctgctgatatgctttaagtgacaatagaattcaatccaaacatatgaatacattgtcccatctgattttaaaggatcgggttaagagtgagcattacgtaataatcatatacacatgccttgtgccaatgaaatgtgggggtgtgattagcttgcttccaaggcttgttaatgataattgactaacggcaa

SEQ ID NO: 3193 - DNA, 364 bp, Bos taurus
  Clone ID: 27-LIB3058-027-Q1-K1-G11
ggcctgttcgcagctggacactgccctactcccaagcttcacggtttacactgaatgcaggccggggctgcatctggctgctgtccccatttcacagaggaagcagctgagactcagagggccaaggagcaagccccagctctgcctcctggctagttcaggatggagctccatctggaagctggctgtcctctgctgtgcttgttcctcaaacatttattgagcacctgctgggtgctgggtccactgtgctagaaaacaaagagggtaagcaatgcgcttgacgcccctaaggccgaggctccatggctccagcctctttcctttccccagcctggcctctgactgcccctgctgccctact

SEQ ID NO: 3194 - DNA, 441 bp, Bos taurus
  Clone ID: 27-LIB3058-027-Q1-K1-G3
cgggtcggcccaagccttccgcggacccgtgggtttttttttaagggggtgccaaaaatgaatgtctctgtttcatgtgttgatattaccaatacattctatttatgttctttttggtcttttgaatatttaatatattgttaagtaggtcttaatcttggtatttgcttttgcaaatagctgttcgaaactatcttcctaattggttgataagtaacaagactattgcactgtctgtttacctaattgggaattaaaagaatagcaaattatgggtcagtataaatctatacagttttactacagtgtaacaaaagttaaaaataatttaggcagattcatagtatcgtatttatcttaaaaaaaggtccaggaaattgaaccttaaaatcattcctaaaacccaacttgggtacttgttaaaaaggagtatcttcagaa

SEQ ID NO: 3195 - DNA, 426 bp, Bos taurus
  unsure (340): Clone ID: 27-LIB3058-029-Q1-K1-G3
caccggcgttcgcactcgggcgtgaagccctaccagtgccccgtgtgcgagaagaagtgcgcccgcagcgaccacctgtccaagcacgtcaaggtgcaccgcttcccgcgcagcagccggctgccgcggccctgacccgcccacgccctcgcccgcgcccccgagcggtcgcctacgccaggcactgggtagcaataagttatcagcccccgttggagggacgtgacgcccatctgggccacctggagccctggggtgcggactcagcaccgacacctccccggggacctggcgcgcccgcgcccgcgccggccggaggcaacctgcgtgccccgcgctntccgcggcccagactgaacccctcctgccgggctccccgcctgggcctgggccggggccagcaactcgaatgccggggaagaaatg

SEQ ID NO: 3196 - DNA, 181 bp, Bos taurus
  unsure (30): Clone ID: 27-LIB3058-035-Q1-K1-G11
gttctagatcgcgagcggccgccctttttnttttttttttttttttttttttttttgggtggtttttctttttcaggttatatccattggtctggggggtacccttgggggcccatgcatgtaaggtagacccccaaggtaagtccctagagggtgtctaactgggcaatagatataaacc

SEQ ID NO: 3197 - DNA, 351 bp, Bos taurus
  Clone ID: 27-LIB3058-038-Q1-K1-G3
gacccacgcgttcgttgaaaaaaaggttattatcaaggttaattcaattaatgcctggggcttctcagaggagagggtacagccgcctcacagggcagctccccaggcacccagagcctttgttttcgacttcctctcctctctcgactgaccttttggagcttttcaatagagaacgaaacaaaataaagctggagctgagagccggtgagcagacgtgtgggtggcagtcctggtttccttcttctcagccgtgcaggcagagagagttcagtcccagctacactgtctggggcgactgagaacttgaacttgggttctccaggcaggccctgctccctggggtcttct

SEQ ID NO: 3198 - DNA, 399 bp, Bos taurus
  Clone ID: 27-LIB3058-040-Q1-K1-G3
gaaaaaccggctcgacccactcgtccgctgcccgtcccgacgtggagactcacgtagatggacgcggaggctgacgcacgacgaggccggtgctgacgctgacgatgctgccgctgcggatgctcgggctgtgcgcgtaccggaacaggtcgtcgcacgccgctataggacccgaaggccccgcccgactggacgggtcaggcggtccagatgtacatggggacttgagactgtgcatgaccagatgcatggtggatgagacagtaaagaatacggctgagacagcaaagaaaccggctgagacagtaaagaatgcgggagacctgagttcaatccctgggacgggaagactccctacaagatggtagggacacccaatcaaacattagagtcttgaaa

SEQ ID NO: 3199 - DNA, 156 bp, Bos taurus
  Clone ID: 27-LIB3058-043-Q1-K1-G11
ggtcgactccactcgtccgcttggacaatgcaggctctccactgagctttataggatggtcagaccttgaagcggagagactgttttttacagtattagattacattgtcttaactatttaaacatatgaaaatggattattataaaaatggcgaa

SEQ ID NO: 3200 - DNA, 195 bp, Bos taurus
  Clone ID: 27-LIB3058-044-Q1-K1-G3
agatcgcgagcggccgccctttgttttttgaccattttttgctctaacttttgtatttggacattggatcctttgataaacataatgactattttttttacctctgggagaccccggcaatagcaggcctgacaatgacaaccgtcatcggactatgcccaagcctactattaaggacatcaaagcaactaggaa

SEQ ID NO: 3201 - DNA, 472 bp, Bos taurus
  unsure (134),(136)...(137),(146)...(147),(166),(182)...(183),(202)...(203),(223)...(225),(263)...(264),(277)...(278),(294)...(295),(317),(339)...(340),(355)...(356),(371)...(372): unsure at all n locations; Clone ID: 27-LIB3058-048-Q1-K1-G3
ttcccgggctcgacaccacgtcgtctcgcgggagcgccgtgggccgccagtcacgagccgagctttccatagacgaaaacccctggtagtgggcacttcttgcgaagaaccatcgtcgaccatccccgcacacncnntcctccatnncgcaagggggaaaggggcngagcgaccctgtcccnntcagcagatcttaagctgnngggggctgaggggcccagannnagccaggaaattcggctttatggacggcccagagcgtnnctgactaccaaanntcggctcaacaagggnnaactcaaggggcacccgacgcnctcagggcaccgccctttccannaaatcttcaagcctnngggaggaccgagacnnagccgttccgggtccccccgatggcaagacccgctgaagcccagctcccctcccagaaaccccgtcccccaaagcttcttaataccaactggcctcgacg

SEQ ID NO: 3202 - DNA, 362 bp, Bos taurus
  Clone ID: 27-LIB3058-051-Q1-K1-G3
tcttgatatgtcagcccctgcacgtgcccctcacaagaggacaggtgtttcggggttgagacccgtttgggggtaaggccagagtcacttctgtcctcagctccgcctgctctccggcctgtctctgggtcttgggggcagagtgctgtggttcatcctgttctgcacctgctgcacacgtgggggcccgagagagaaggcaggcgagggaggtcttccatccccaccctgggagcccacctcctcttcctgccgagggctggctgccggagtaagtgaaggctgaaggcagtcctttctgctagatggctagtggcttttattgtgttttttttgtacataaaaaggttttctaccatctg

SEQ ID NO: 3203 - DNA, 279 bp, Bos taurus
  Clone ID: 27-LIB3058-052-Q1-K1-G3
tagatcgcgagcggccgccctttttttttttttttctgactagaccctttattattcagaaatgaacatcctaaagtgaggctttttttctgaactgtattgagcaaaaatgtattggagaaaacacttaattagagtttcccccaccaggattttcctttcgcatagactgtaatcttgtgccctttgtaagttttttgatacagaagagttatttctggaaactcttaagaatgaaaatagtgcttgattatcgagatggtttatggacacatattt

SEQ ID NO: 3204 - DNA, 76 bp, Bos taurus
  Clone ID: 27-LIB3058-053-Q1-K1-G3
ggccgcttcactccgggaaccttcacttaccagatccaggccgcattcaaggagccaaggcttctggtggtcaccg

SEQ ID NO: 3205 - DNA, 458 bp, Bos taurus
  Clone ID: 27-LIB3058-057-Q1-K1-G3
cttttggtcaaagcaaatcaaaagtttggctcatattcaagggctggggaaacagactatacctcgtggagaaactacaaatgatttgtggcattttttctatctatcacaaatgactttggatagcaaataacagtgtttctttgtttctttctctcatgcatggggccttgctctgtccaggctgaagtcattaaacactgtcctggccctgccgaggggaagaagtgaggggtggtggatggggctctcctagggctgggcccactctgggaggaccctcaacatctgtactctggtgggttagggtgggtgggtaggccaggtaggacactccaaaggagcttctgaaatcctgtagtcctgcggggaagcgaagaggcagaggaagggtgcagagtgaggtggaccttcctcttactgcactgctgagggaactccaccacttggcattttca

SEQ ID NO: 3206 - DNA, 417 bp, Bos taurus
  Clone ID: 28-LIB3058-001-Q1-K1-G11
gttctctagttgcaccacagcacatgggatcttagtccccaggccaaggatcgaacctgtgtcccctgccttggaaggtggattcttaactactggtccaccagggaaggcccggagcgaggcttttaatgcagccgtcccatcccttctccattactctacctcggcagggtccgaagttgtgcttccctgggaatgctctgagaatgctttagcagaaaccgagactgggctctgcctcatggcccaaagcaggacagcagtagagaagaaagtcattcctgagaccacaggacagaggctccatggaacttctcagggtctagcccctggcttccagggttccccagcatcagcaggcagagacccatcttcctgatctaggtgacttcccaagaccagatttaacgtgcttct

SEQ ID NO: 3207 - DNA, 149 bp, Bos taurus
  Clone ID: 28-LIB3058-003-Q1-K1-G11
ctaacatatagcatcagactccagaggcaaattacatcgattctcgtatttcatcgtagcagtggctacacagcctatctgaagtctaagggatatacaagagaagcctgaatatatgggcactcactgtggatgagcattcaatggcc

SEQ ID NO: 3208 - DNA, 297 bp, Bos taurus
  Clone ID: 28-LIB3058-005-Q1-K1-G7
cggacgcgtgggcgcgagcggccgcccttttttttttttttttttaaatgtcatcatcatagtcttttaatattttacataaaaaactggatacacagcttatagaacttttatgtaaacatcataagctcaccactgtcatttgtcagtttatttaaaaaataagtaaaacaagacaatttaatagaagtaccaccggatggtgaagggagggggagaagagacacaagggggagggttattctctgtactgagatgcagagaaagattcacacagtttgagagactgccttgtgg

SEQ ID NO: 3209 - DNA, 428 bp, Bos taurus
  Clone ID: 28-LIB3058-007-Q1-K1-G7
gcggaacatcatttgcgagacaaggaggacttccggaataaagtggaggactacattaagcgctacgccagatgatacggggagaggactgcagggccgcggactgtgcgtgaaaagatgggctccacccgcaaccagaggagcctctccccgatcctcggctcccctcagtcccgccggctcgtccgggtcctgtgaccgtgttgtcctgaggaagaacctcttcacgaccgcccattgtagccggagagttccacataaatacagccagaaaatgtgtctggggttctaaagagttgtctgcttcccttaacatgtttacttttttgaaactgtactgtataggctgttgatgagaatgaactcagcgtcgaagctagagctgcttctcccctcccccgtcagtcccgcgcaggtgatgctgacgc

SEQ ID NO: 3210 - DNA, 380 bp, Bos taurus
  Clone ID: 28-LIB3058-008-Q1-K1-G11
gggactcttcaggccttatggaacacgatgcatattcagttgttgtgatccagcttttcgtgtcagcaaacctaggtttgttctagattaactgcggcttggaaaaaagtgccttttgctgctttgaagaactggggtgtatggagagaagcaaccatgtactttgcttttactggtctgtctgtggcactgctctctattggcatgtatttctcttaaacgtgccagaagcactgcctgctaccacaccataccttcacatcctccccatgttctcacggtgtgcatagtggttaggagaggcatctacttacatgagttacactacacactttacagccaacaacaacagatcggtcttcatagcaggagtgccatct

SEQ ID NO: 3211 - DNA, 363 bp, Bos taurus
  unsure (337): Clone ID: 28-LIB3058-012-Q1-K1-G11
gtaactggtgaaggccatgggggtggtgctgactcagccactctgttcccccaggaacttcagggcaatcttttcacactgctccagaattcctccctctgggtgtgtctggagggtgggcaaggctgggagtggtgtcaacttggaggagggcacctagattcaaaaagacttctttctgcccaaggaacacaggttccttcagctcccacccctatgcatgcatcacaggtccccccaaaaggaggatatgtgggtgggtgggagggctggggcaagggccagatagaaattattggttttgtttttgatttttttgttttctgagaataaagantttgttatatcataaaaaaaaaaata

SEQ ID NO: 3212 - DNA, 224 bp, Bos taurus
  Clone ID: 28-LIB3058-014-Q1-K1-G11
acatgaggtgccctattgctctgcctttcctgcttcgtcctcctgtagagtttcatcaaggcccatgcatacttgcacgcacacacacaccatgacccatgctggggaaaggttggtttcctcttgtgggctgggagtaggagtttgtaaatgattggtccctggttagacagatgataatttggtgttttcttgtgatttttaagagccagaggggttatgct

SEQ ID NO: 3213 - DNA, 455 bp, Bos taurus
  Clone ID: 28-LIB3058-018-Q1-K1-G7
cggacgcgtgggtttgctgtaaacattgaagtgagtgggttttagagtccttactgggggaagggaatagtgcctgtttttccttttccttttctgtaggagatgctttgagggtgtcagaaaggcgggagcagaaattaatcccaggagctacagggaaagctttataaaaggtcatgtgaccatcgtggcttttatggagaaagggagttttgatttgaacacttctttctgtgcctgcatcaccagtagctgtgcctagaagaagctgtcaccttagcagtttggaaaggcagaagcctggcctccggtttttatgacattcagatagaacaagcaatactcattttctgccaagggatagctcttgaggttagagagttgtccttttctctgtgcatggagttgggtttatttgaaaagggagttagtttatttgaatattgggacgtcaa

SEQ ID NO: 3214 - DNA, 53 bp, Bos taurus
  Clone ID: 28-LIB3058-020-Q1-K1-G7
attgctgctagtctcaacttcaaagatccctttgtgattccactgggaaaaga

SEQ ID NO: 3215 - DNA, 413 bp, Bos taurus
  Clone ID: 28-LIB3058-024-Q1-K1-G11
gcctgaagacagaatcctcttaaatatgagactggtgtataatattgtctttatagttaatattgctgaggatttgctgggtaaaccttgtctggtcgcatgtaagtatttatttaaatacattttcctttgttattgttatttcgttttcagccattaaatgttgtaaacatgaagccttaaatagaacttatttcttatggatagtctatttttgtctgtagttatatgttgttgcctgtagtgacctggttacagtgcaaacatgtatattctggcacatctacagaagggcactgagcatcagttttgttttcttttaaatggtagtagtttgctgtatctaaaataaatcggtgaagggaatccagtcttttaaatgaggggtattatgtgaggcaatgataggttgt

SEQ ID NO: 3216 - DNA, 428 bp, Bos taurus
  Clone ID: 28-LIB3058-025-Q1-K1-G7
ctctctaagcacaatgcatgggagatatattattataaagtcctcaacacttagcagtcataaactgggaaagaggtgggtggtcagcttctttgggtgaaagttgttgtagctgctgctgggatgtcctctaagctgcaaagaccagctcctatccccatgaacttgagagaagaccaagaatcaggcttctgatgtatcattaaggttcttataaaaatggttgtttattgcaattttttaagtataggtatacagtcagagtcaatcagtgaatctctataatggggcaaatctcatactctaccaactacatggtaggtaatttaaaacatgaaagaaatgttaactgttggcattcttgctagttaattgtctgtgagtctgttaaaaaaaaataacatttgattattatcagtcattataaa

SEQ ID NO: 3217 - DNA, 189 bp, Bos taurus
  Clone ID: 28-LIB3058-026-Q1-K1-G11
aagtgtagtgagcacttggacctatactaacacttaggaatcacacgtggcagatccattatgcctctgtttacatggaaaatgtacatcgaaaggcaacagaaatcaaagttccacaaagaaagacctaatactataaactatcactagaccgaatatgtcaattgtatgtttactatgccatggacc

SEQ ID NO: 3218 - DNA, 174 bp, Bos taurus
  Clone ID: 28-LIB3058-028-Q1-K1-G7
gcgagcggccgccctttttttttttttttttttttttttaaaacaggtcttgtattggaatactgaatacatggtatttgtacagagtgtgctggggatgaagtttattaaagaaaaaaaaaaaaccactggcagaaatataattaaaatggggaaaaaaatcgaatataacac

SEQ ID NO: 3219 - DNA, 293 bp, Bos taurus
  Clone ID: 28-LIB3058-031-Q1-K1-G7
cggacgcgtgggtttggccacagggcttgtgggatcttagttccctaaccagggatcgaactcaggcccacagcagtgaacgcccaagtcctaaccaccaagacatcccctatttttattttttaatttaaaacattaaattttttttttctcttttagccatgctgcatggcatgtgggatcatagttcccttaccgggggttgaacccatgccactgcagtgtaagcagagtcttaaccactctaccactggggtaagtttctccctagattttatttttttgagtagatt

SEQ ID NO: 3220 - DNA, 429 bp, Bos taurus
  unsure (422): Clone ID: 28-LIB3058-038-Q1-K1-G7
cggactcgtgggctcgagcggccgtcctttttttttttttttttttgaaatttccaatggatctcaagtttaataaatttcttcttggcttactctaatagaagagtttattattccattgtttttcaatttttgaataactggtttttcttgttttcatgagcattaatttttttaaagtaatacattatcataccaaaccatacatctaaatatcaacatcgcgtccccaaactcaggaggctctgtgtcttctcttctgtctccaccatcagttcggccatcctgaaactggcttcacggtgagcaggtcccatcgattctttggtcagcatcgtcttagcaccaatatctgaaaggagaggaaaccctagcctctatccaggggaacaccatagaaacgaagagttcagaacactcanggtgaaa

SEQ ID NO: 3221 - DNA, 231 bp, Bos taurus
  Clone ID: 28-LIB3058-041-Q1-K1-G11
tgaagagcttctgcttaatattccatttacaggcaatgtcaagctaaaaggcattattataatgggagaagatgatgactcacacccctctgagatgagactgtacaagaacattccacagatgtcctttgatgatacacacaggcagccagatcagacctttagtctcaaccgctatcttacacgggaattagaatatgctacaaaaatctctcgatcattaaatgtcta

SEQ ID NO: 3222 - DNA, 304 bp, Bos taurus
  Clone ID: 28-LIB3058-042-Q1-K1-G7
gggccgagatccagcgcttcgttcattcatcccaatatctacgccatctacgacctgatcgagcgcatcgaggacctgcgctgcagaacatatccgtagcacgtcattccatcgaggactccttttgaacagccagcagtggaccatgagccgatcggtgccggagcttaatgtgggcattgtatgaaacctgtctagggggatgtcggatgtggagcagtgcaatcttactaggacgtatgtccatgttgttgcacccggaagttggcggggaaactatgctaaaatatgtaactatgcctta

SEQ ID NO: 3223 - DNA, 429 bp, Bos taurus
  Clone ID: 28-LIB3058-044-Q1-K1-G11
ctgacagagcccagactcgccggaccgttgcagctggagcgtttctagtctccggcgtgagtggccgcaggaggtgtggctccgggtccgggtggccgtcgggagggagctggcggcaggatgatggaggaggaggaactggagttcgtagaagagctggaagccgtgctgcagctcacgcccgacgtgcagctcgccatcgagcaggtatttccaagccaggatcctctagatagagcagatttcaatgctgtggagtatatcaacaccctgttcccaacagagcaacaggttggcaggggaagagtcatgccagctccttcagcgactgagctcctgttaccacagtgatgatttatccccagtccggttttgaaataacagatggcagtggattcttcgattaaaaaaacttctttttgaacagac

SEQ ID NO: 3224 - DNA, 453 bp, Bos taurus
  Clone ID: 28-LIB3058-045-Q1-K1-G7
cggctcgacccactcgtccggtgctacatcgccagccaccgcccttctctctccctgcacaccttctccatttatagggcaatttttatactaacatcttcccaattcactacccatcactctctttcaactcttcaccccaaccaggaactcaacgcacaagacccacttacccacgaaccataaactctactacactgcctccctaacccacccctgcctaacccctataaaccacatagctttgtaataccctgctaacgcgtaaccactatctggaaacaaagactatgcatccagccttccctactcgatcaataacactgccacctgaacaactcacactctacctctcctgactattaaagttgcaccataaaactgccttctacacagaacttcagaccaccattctgaaacctcatcctataccagaacgcacacctactattc

SEQ ID NO: 3225 - DNA, 438 bp, Bos taurus
  unsure (387): Clone ID: 28-LIB3058-048-Q1-K1-G11
gtgtcttataacgggtgccctgacacttgcccagtcctgcagatgattccataatttagctaatgccttttaataatttaggtgacattttgccttgtacgattttaggaagaaatgtaaatcaactcggggctcagccagcccctctgtgtgatgtgtaaatatatataactaatgtcagaactcagacccaagcaagagatcttttttcccctccttctcccctaatgtacaagatgcattttaatattaattcctcctttatccatatatcaataattgagcactgcatcaatgaatatgccaggcaaattgcattccccatcctctcgtttgtgatgtatttcagtaatggagataattttcaagataaagtatacaatttanaagggatttaaaaagaacaactaataaaggagaatcgatttagggaaaggg

SEQ ID NO: 3226 - DNA, 128 bp, Bos taurus
  Clone ID: 28-LIB3058-049-Q1-K1-G11
cggctcgacccactcgtccgggggcgcttggtacatatcctgcccgtgaagaaaccgcaccccactccaatactggggcctttataatacaatggacggacgatcctatcacacagcactacatgcac

SEQ ID NO: 3227 - DNA, 432 bp, Bos taurus
  Clone ID: 28-LIB3058-049-Q1-K1-G7
cggacgcgtgggcggacgcgtgggcttttactgtctatcactacaatggattgaaacagtcaaattacaatgaaaaggtaatgtatgtggaaggaaccgcagttgttatggggtttgaagaccccctgctacagacagatgacacgcccattaaacgctgtctccaaaccaaatggccatacattgaattactctggaccacagatcgctctccttcactaaactgatttgcctaagtatttataaagaagattgtaatagcagatgttgaaaaaaggacgcaagactggcaagtggcccaatgaagctatacactggtatcactgataaactgtaaataacaattaaagacacattttcagtgtttaagatatgtttaaattatttgttttaaggctttatgttaaaggttaccctatttaaattctttat

SEQ ID NO: 3228 - DNA, 417 bp, Bos taurus
  unsure (273): Clone ID: 28-LIB3058-052-Q1-K1-G7
cggacgcgtggggtccgtgggatctctttacggcctctggactggaggccgagcgcccgcccgcggccgagccccgcgcccggcgtctccgcccggggtgctctccgcagtttcctggcttggaagcctcgggaacatggcgaggcagcggtggtttaacgggaaggacggtgactgttagcctgtgaacgaaagcgagagtgagccgcctcacgctccggaccaagagtgatcttgaacttgtggctgctactagatttttgcccacacctnctcgtatgctgcggcttctccactggagtggggccagggtgaccgtggacttgccgcaggtcagacggctgcaggtcacagcaggtccagtctgtccacctttgagcggcggcggcatgtccttccccaccctcgatgaccccc

SEQ ID NO: 3229 - DNA, 417 bp, Bos taurus
  Clone ID: 28-LIB3058-053-Q1-K1-G7
gagaccgtgccgggaggagggaggcatgacgctctccttcagggtctttcctcttagttctggtatcttcttcctctctgtcttcctccctttgtcccgggcctgtattgttggcaatgtagtgggcttcccaccccaggtgatgagaactcgaaagtcagccgtgcccgcccatccgagtagccctggcggctgcctgcccagcagtgtggaagcagagtcctgcgtctctaggagttgtcactggagtcacagcacaggttctcctttctcctcccctcttcccctgttacaggacacagtcactatttattactttcagagaaatcagatattttatagagagaacatgtttcacttgggaaggttggaggctccctggggcagtgcctctttctctagcggctcctcacactc

SEQ ID NO: 3230 - DNA, 244 bp, Bos taurus
  Clone ID: 28-LIB3058-054-Q1-K1-G7
tcgtctagatctcgagcggccggttttattttagagctgctttcttttttttttggtttttaaaagcttgggtttattgttttaaccaaaatcaatctattttcaagcaaatgttaatggtctcttgtttacaatttgggcttcaatggccaatcctcagttttccataacttctgtaacctgtcccagttacaactgtcatcattacttcctaatttttaaacagcatgccatttttattcta

SEQ ID NO: 3231 - DNA, 290 bp, Bos taurus
  Clone ID: 28-LIB3058-057-Q1-K1-G7
ccgtacagttacaagcagccatatgaccatatataattactgcggtcgttccaggattataggggaagctgctgtctattatatggcccagtcctcaacctggtacaaatgatccctcatctagcaacacaggaccctcgaagatcaacatgcctgacaactctacgcatgcagttgacatcacatgaccactcatgaaccccttgcgctaccgccagtctcagatgctgtactcgctacctgcaccggactgactcgcttccagacaagctccgttcccacagccacac

SEQ ID NO: 3232 - DNA, 312 bp, Bos taurus
  Clone ID: 28-LIB3058-058-Q1-K1-G7
gacttaagcagagtctcgggacggtctgtttcctcagcctctggtgggagcagtcaagttggtttctctgtggtgcaggttaaattcgatagtgatgtttatgtacaaaaagttaaatattacttggccacgatttaccgaatagctaatctgtggagtcaccgtacaccgtgagggacgcagacatggccaaggcccaaggccagcggcgcgtgaggctgacccgaccttgcccgtactctcgctagctgaatgactggcgtcggcccgacatctgggagcccggaaggcgcacggataggggcccgcagg

SEQ ID NO: 3233 - DNA, 132 bp, Bos taurus
  Clone ID: 29-LIB3058-001-Q1-K1-H1
atttcagactactcaacttgtgtaagcctgctactaaaagtcctaactaccaacttgtgtaagcctgctactataaagcctttaaggactttctaagtataagtataagtgtatgggaacttgatttataaa

SEQ ID NO: 3234 - DNA, 423 bp, Bos taurus
  Clone ID: 29-LIB3058-005-Q1-K1-H1
cacagcctgcgtgggcccgggcctctgcagctggctggcgcccgcaccacacatcccatgcagcctgttgtgctgagtgcaggcagagcagcagcccgctgggttggcttccgaagcgtgagtggactctgttgtcctggtggtacctgggtcttcggccccgcctttgcgcacagtcttgttgaaacaagctgggtctgtgacgggaggaggccgcgtgggtaccctggcccttggtcccaaagacgcactctggaccgcgggctccgagctgccgcctctggcacgctgagggctgagggtcccccatgcacttgttcaccctcagctcagcgctggcgccctttgctgcgtcttgccttttgttctgctgttcgtacctgagaagattgctcagctgctcacagataccagcacaaggtc

SEQ ID NO: 3235 - DNA, 418 bp, Bos taurus
  Clone ID: 29-LIB3058-006-Q1-K1-H1
cttcctcagcgtcagaccccagctgctgggggggcgccgaaagaggaagaggcagcaaatggagaagtgaggactcggtccctctgctgccgcccaaagacgcaaacttgaagccaccgagcccccacgggggacgggcaggaaggacccacaggccatgagtcggcagtgaaggccgctggccagcctgggagccccaaccctgggctggcatggcgccttgcaggaggtggggcagggtccagggtagaggccaaggaggagggaaaggtgtgagcttcaggggaagacctgggcctgggccgtccccacccccatgtccctgagacctgggatccatacccgccctccactgtggacagttctggagagccagcccatcagagcactttttctgagggtcctgagcccttgggcc

SEQ ID NO: 3236 - DNA, 81 bp, Bos taurus
  Clone ID: 29-LIB3058-007-Q1-K1-H1
atacaaccgctcttgtagcctttggttttttgttattgtagagaaacacagattctttatacactttgtaagatttacgcc

SEQ ID NO: 3237 - DNA, 436 bp, Bos taurus
  unsure (19)...(20),(35),(37),(39),(41)...(45): unsure at all n locations; Clone ID: 29-LIB3058-009-Q1-K1-H1
gttctagatcgcgagcggnncgccttttttttttntntntnnnnntttttttttttttgttcagggaagattaatgccattggatgtctttgcttcatattgtaccaagcgcttaacttttgaaactaaactagccatattaaagaacctgagttttgctgaattcctcactttacataaggatgattgtttaagcccatcagtatagcaccatttaaataattcctgatctccattttcctccctaagtaagagtatcacagtaccccatatacagtgatgtgtatttgggttataaaatgactgacaattgtatgcccctgatgtttctcaccagtactccttagttctgctggatcaaggagtgtgggatcaagctaaacaaaatgctatttccagaaatctgttaggtggacttttggctctcttatatatt

SEQ ID NO: 3238 - DNA, 241 bp, Bos taurus
  Clone ID: 29-LIB3058-009-Q1-K1-H9
tcgcgaggcgcgagaaccgacttttcaccgtctgctcgccgactctctctctcggtcggggcgcgcgcgcgcgggagacaggccaaccgatcgccaggccggcagccatgggcaagcacggtaagtgcagccacgacgtggaggcttgctacccgccgggggcagcgggcggcggcaagtacccgtacatgactgagaacccagagctgtagtgggccttcatccgcaaggtgtacgtgat

SEQ ID NO: 3239 - DNA, 196 bp, Bos taurus
  Clone ID: 29-LIB3058-010-Q1-K1-H1
cggacgcgtgggctggacagtggcccaccctcgtctcaggtctctgccaggtctgatggtgcaggtttggtgcttggtcccatgtaacccactggctgctgcattaacccaggaatacccaacttgtgtatctgtgtgtttagctgggaactcacccgctataatgaactgaataaagtgtttataaacatattac

SEQ ID NO: 3240 - DNA, 416 bp, Bos taurus
  Clone ID: 29-LIB3058-010-Q1-K1-H9
tcgcttattagggcttagggaatctcaacaaccaaatagaatatcgtttccaaaacaggaggaatgcttcacaaatggcctagacttaggaataaatgccctgggcttacagaaagctcatttccctcactgcacacagggttcttgtagaggccaatagaactccaggtattcctcagtattcaccaggaatcctctgattgacatgggaccttaatagtgtatcttcatctgtatttaggagttaaggtcatgaacctttataggacccaaaggtacaaaactgagtcaagtgattttcactaaacaagactaacaaatacagctaataacactaaacaacagtgttcttttccttattctcagcaaactgaaagtcacccatacgagagatttttttcaagtttttctctccc

SEQ ID NO: 3241 - DNA, 135 bp, Bos taurus
  unsure (101): Clone ID: 29-LIB3058-012-Q1-K1-H1
caagttgctctcgtcccagcagaagcaggcaaggcgcggacagtacaggctccatcttgctgccccttacatcaattggaaaagtttgtgagttgcgcccncaagtttgggggtaccctgacttgcggcgtttgg

SEQ ID NO: 3242 - DNA, 415 bp, Bos taurus
  unsure (368): Clone ID: 29-LIB3058-013-Q1-K1-H9
gctcagcccccctgcccagttgccttggaggagacactggccccgccagggtccatccgtccccctcaggctgcagaggtgacccactggggttcttgtctgggggctccccgacagcatacaccccctcacctgccccggcctggggtcagaatgtcaggaagggacaccagcgtcatgttgtgtgtattttcaaagtccccgagaagcgccggaaggggagtctggtgacagtaaccatgtggggtgtcttcacgtggaaggtggagccaccttcctggacagtctgctggaagttacccggtgtctcctcccaggtgtctgcctcctcctcgccccctgctcctgccttgctcaccccacaaggnggtgtcacacccaagagggcttcgttggtggctgtgtttactctggg

SEQ ID NO: 3243 - DNA, 346 bp, Bos taurus
  Clone ID: 29-LIB3058-015-Q1-K1-H1
gctttaccttctctgagtgcctccgcccgagagatgcgtggtccgtggctctgggagaccacctcttggtgtggtccgtcgaaggccttccacttcattcacccccgacccttacatagacccacccttgcccaagagcatctagatgagaatcagaaggaggttcaaggaaccgaatgaaaggtcagccctgtcacccattccctgcccctgtgctgagctccagccagccccatcaccagccccaccggctcctggttggaatgaaaagggtctctggttgcactgaatgcagctctcaaacttggtcttgtacttgctgaataaatactgttgttcttgcctt

SEQ ID NO: 3244 - DNA, 350 bp, Bos taurus
  Clone ID: 29-LIB3058-016-Q1-K1-H1
ggaagggtgggcatctctcaggttggttcccttcttgatggcggcggcagtgctgttgttgagaggaaaaccaaggtttgccaaaagacttaaaagtgtctatgaaaagtaactttgttgtgttttttaaatttaaagaactgatagctttggtgtttttgtaaaatccatacatgcttattgtaaaaactactggaaatcttggccttccccatccactatggcgatagctcctgacctctgacctccaccgtacatgtacatgtgtgtacttagcatgtgggtgtgtgtttacagtcatgtaaatgggaacatttcatacgtggtgctctgtgacccacaatttcatg

SEQ ID NO: 3245 - DNA, 452 bp, Bos taurus
  unsure (423): Clone ID: 29-LIB3058-018-Q1-K1-H1
gccgggagaggtgctgatgaagcccttggagatgaagcctcccctgtgcaggaatcggtcgtgcttctagactgggatgtcatcgcctcacccccagccccgggtgtttggatggattttaccgcgtgtctcaccccagaggctgtgggggcgcttgaggggcctgtgtccgcctgaggcccctggccacgggcatgtggcaggtctgggagccgggtgctgtggcccagcactgtctggctcttcctctggcggcttgggcagggccggcctgagcgctccgtggtgaaccagcgtgggccctgggagacctggggctggtggggctggcgggacgagcgaaggggacagcttccagatgacttgaaaccttgtgctcagccgctgacagaccttggacgagcggagtacctctgagtcctncagtggacacccttatgagggggcagtgg

SEQ ID NO: 3246 - DNA, 415 bp, Bos taurus
  unsure (171): Clone ID: 29-LIB3058-018-Q1-K1-H9
cggacgcgtgggtgacctcgggcggctaccagaagcgcacggcccgcatcatcgccggactccatccttaacctgtacagcctggggctcatcgggcccgagtccgccagcgtctcagcacagaactcagacacacctctgctgcccccggaggttccctgaccatgccgncgtctcggaggctccccgcctggccgccatctcgccacccaccagcctcccagcgtgtctcctcctccagccgagggaccagggggcgccttgcacagctccactctcccccctccccgggtgttgggggctctgggcccctctgcggacggggcagagggcagggcccgagtcccggcaggacccatgggggcacggcctgaccagaccctgcagaggtgatggttctcccaggagggaggag

SEQ ID NO: 3247 - DNA, 474 bp, Bos taurus
  Clone ID: 29-LIB3058-021-Q1-K1-H1
gaaaaattgttctactaaagaaaatgacaatgctcttgataggtattccatgcagatgagtggttctgcggtaccactacaagagatgagagtattaagacaaaagttaaggatgaagaatcttactgtgagttgaaaagtttgacagtcctaatttgggaccaataattccctggtggagaagcatgactacatcaacagttaatttttttcaacgtgaacccagaaatagaaaatctattatttcaccttcaaggcttcatctctaaggtcacgctccaagaaggttttccatgatgttgctcaatttcatctgcaccaggtgaaacccactccagcataaaaaccccctgcttattttagtatcaaagaaggctgaggttacttctctgtcataaacctgtaaatagcattttataaatcaaaatcaccttcaaaacagtggattgttctacaaatatatatgtgtatata

SEQ ID NO: 3248 - DNA, 367 bp, Bos taurus
  unsure (289): Clone ID: 29-LIB3058-022-Q1-K1-H1
gtgcctagcagtgcccccgtggagcttcagtgggacctggaaacttggccgaattagatattgcgcctcttcctgctcacgagacctccccttggtgtcattgtggatccaggggtcttcacaagtccatggaattcctttcttggcccttgtctcacatgcggacagcaaggttctgcagaacacccccagattccattccaggtgggctggagtcgggggtctcctctggcccctgcccctgcagaaacctccctgtgcccctcatttggcctctggctttcacagnctcagtgggctgtgtgcacacgtggtcaccctgtgtccttgagaactttttggaagctcccgaggggatccccacgta

SEQ ID NO: 3249 - DNA, 421 bp, Bos taurus
  Clone ID: 29-LIB3058-026-Q1-K1-H1
tgtgccctgaactcatacacctgctccccagacatgcctgcccctgaggagacatgcgttgtgagtgggagggactcagaaacagccaagcagcccaagaacacaaaggccagtgctactcagatggccctgaagtttgtagcatgtgtaaacccaactgtgtgggccagaaatactgttagattctttctggcttaaactttcaaaagcaaacaagtggaacatggaaagtgaattatctttccattgtaactgtgtatcagtatactccatatgggttccaaaatcagctgctctcttcaagtaagatttggatttagaacatgaaattgagaccccccataaatgttataaaataacattttatattccctatactatattgcctaaaaaaggggcatttttttcttagcttgactaa

SEQ ID NO: 3250 - DNA, 389 bp, Bos taurus
  Clone ID: 29-LIB3058-027-Q1-K1-H9
catcctgcacgcactcttctcagggatgctggagagggagggagactctgctttcctggaagatgtgacaggaaagttgccatcagatttcatctgttcccatttcctgaggtcaggtaacaagagaaactagtagtgaagacttgtagcctccatttacatttcatcagacagggtgctgacttccctcccccttcccaggagaagattcactcctgtgtgcaccacctccaggctgtgggaccactgtctgtcccaaagatccccactggtttgagtcacccggggaaggatcggttgctttgtgggacctcctttctcagctggtcttaagttcctctgaggaaaaaagcctttgcttttcccatttctttcccttccccaccaaa

SEQ ID NO: 3251 - DNA, 435 bp, Bos taurus
  Clone ID: 29-LIB3058-029-Q1-K1-H9
gtggttccttagaggaaagaggaagcctcagaagaatagctttccttgaagaaaacagggacctacttgtttgccggtgggcacataaacatacacaaaagcatagtagtatctatgggccaccggcaaagaagtaggtgaaatggcagaagtgttcaagaaagaaactgtacatttgaggtaaagaacaaaagtggcagagtgaaaaatataagtgcttcctaaaatcaggtgaatgatttttaaatgatgatgccaataaagtgttaggacctaattcttaatacaacctcttaatgggatagaatgaaatcactggaaatgtatcagtagcatagattaagaagctgagacatgagatggtagacagcaaactcctcagcaggtctgaactctggattagacattttagaatatgcgacttactcatattgg

SEQ ID NO: 3252 - DNA, 326 bp, Bos taurus
  Clone ID: 29-LIB3058-039-Q1-K1-H1
cggacgcgtgggctaagcctctccattgtgacctatgtctctgtgacccattatgagttaaatggtgtgtgccagtgggcagtaggggtgtaagttcaccatttgcgtgcggatgtctaaatgtcccagcactgtttactgaacagaatgatggctctggcttttgacctcactttcgctttcccccacagatctgcaagacccccgagcccaaagcagccttctactgcagcccttcagtgcccgtgcacttcaatatccagcaggactgtggccactttggcgccttcgtgcccttcagcatgctcacctcttccgacgcacac

SEQ ID NO: 3253 - DNA, 447 bp, Bos taurus
  Clone ID: 29-LIB3058-040-Q1-K1-H9
gacccacgcgttcgatcgcgagcggccgcccttttcttaatcctagtcaactggaagcaagttgattataagaggtcatttggaagaataaacaaagaaggatcaccaggaaaaatcttaaatgaagagcaatggctacatgggtagaaaggggctagtcacatcagagttcaaccctactctagtcacatcagagttcaaccctactctagtcacatcagagttcaaccctactctagtcacatcagagttcaaccctactctagtcacatcagagttcaaccctactctagtcacatcagagttcaaccctactctagtcacatcagagttcaaccctactctagtcacatcagagttcaaccctactctagtcacatcagagttcaaccctactctagtcacatcagagttcaaccctactctagtcacatcagagttcaaccc

SEQ ID NO: 3254 - DNA, 430 bp, Bos taurus
  Clone ID: 29-LIB3058-042-Q1-K1-H1
tcagaaaagatggagttgaactctccttgcatatatggcagagaaaagtctgactccgaaaaaatgggtctgaattttgtaaggggtagtaagaatagccaatttctttatatattccaactttgcaggtaccatcctaaagtttgaaacacggtcacagctcagagttgctatttatccaggatagagatgttttaaaatgtatttttaagtgaatattccattaatacatgtacaccctttctttgaaatttagaaacctaattgtgtccaaaactttgaacaaattctatgctaaaatatttaactatagcagataacagaaattaatacatccttccctgaaaccagagcttacatatgtttttccccataaaatttccagataaatgtattcaagatgcaatacagtattttaacatttacatgt

SEQ ID NO: 3255 - DNA, 435 bp, Bos taurus
  Clone ID: 29-LIB3058-045-Q1-K1-H1
caggaaatttaaattaccaagagatgggggaaaaaaatctgttcttcctaaagaaatcgcttcagatagagctcatggtgtttagtgatgtacttgcagtattgtttgaagaattgttttgtcttaaggaaaaaaagatgttgcacatgatttgtactgcagcaaatcggcaaaagtgatctgagttggatatatttgaaggtattttgaaagttacgttcaaggctaacacctgagctttgtgtaatgtaaataagaccttgtgtttatgaacctttcagctaatttgattttttttttcccttacatgccaagtgatgttcaggttttaaatgtttttgtatcagttttttcctttgtaaatggcattaacattgttacttgaggtcttgcttaatcacttttgttgtcctgaggacttggatttacagtgca

SEQ ID NO: 3256 - DNA, 304 bp, Bos taurus
  Clone ID: 29-LIB3058-046-Q1-K1-H1
cctatttgtatgagtatggctggtgtgtccttcagagagtccatagtagtgatcagtccagtacacttgtgtgtacaagtgtgataaaaatttcttcagaacctagacatgacattgttatcagaaaacctgcacagcaggggctagttataaaatgttgtattttaagaatttaagagggagctgtattttttacagtcatctgaattccaatgaggagacctatttgtatgagtatggctggtgtgtccaacagagaccaaaatggcacaattttcaagaaaatatacagcagtgaaaacct

SEQ ID NO: 3257 - DNA, 241 bp, Bos taurus
  Clone ID: 29-LIB3058-048-Q1-K1-H1
gaatctgtcagtggtgggtggggttctgttagatgagaattacgttttttttaaggaaaaggtagaaaataagtatctagaaggttgtcatgaatgactctgctgacaaaaatgcctgaaacctccatattcattttttaaagaaggaaagttaagtgcttcaaagttttctaatagcagaagcatgcagttttctgtggaatctcaaatgttgtgtagcagtctctttcaatcttacatt

SEQ ID NO: 3258 - DNA, 376 bp, Bos taurus
  Clone ID: 29-LIB3058-051-Q1-K1-H1
ctgtatcaaaatatgaagccttttctgtctcctgcctactgcccttaattcaacacaggtgtggctcctgagacactgggagacttggccctgacatcagacactgattcagcactgctgggctgtgttattctcctgtgagacagaagcagtctaagggaaccagactcctagacaaagctgctctgagaccatgttagagtaaaacaaaccactttacatctctggataagcacaggaaaaaagatagggcacactgccacccctcaaataccaaacattgacctggcttaaaaacaaagtgactgcgcctttattttgtaaccatttgtagccatttatctctagaaggtcttaactgttgttgttcagaggt

SEQ ID NO: 3259 - DNA, 444 bp, Bos taurus
  Clone ID: 29-LIB3058-052-Q1-K1-H1
gaagtcatgatagctggccctaaatgtgataaaagttcgccatctggtcagctgatagacaacacagacatgtggtatgttggagatgctgtatcatattgctaccatggttctcttgttcagctaccatggaagatcagcctcctgagagccaagtgatacagacatccatgtagcaaaaccaagcacgtttttgttaacagctatattcatcactctacccctaagtctcccaccattaaatcatttggaatatacctatcgcttattatatttactaaactgtgcaaaataaaatgtactgataatcaagctgaggcaaaaacaaacagtagcttaagctaagcaataaattagtcttatgataattgcaagagaaaaaaaatggcagcatttatacacagacacatcacataacatatgtagaatttatgtgtggaaagg

SEQ ID NO: 3260 - DNA, 379 bp, Bos taurus
  Clone ID: 29-LIB3058-054-Q1-K1-H1
caaaaggatactgcatctcttgttgtatagctgaggttattgaagttacatataacacatctcagtctctgtttcttggaaggaaagtcctgctagttgactgacaattctaagcagggagaattaagataaatgtgtttaattaatgttttgcacacatatgcagaatttgtataaccacatgacatcatagttgtgatctcaaaaaaaggactttatctttttcttgcagttaaatgtatgaattctctgaaactctaagcttctgaagtgttagaggtagagatggtctagcaaagatgtagtttgtaatgttttatccatttagcatgtgtttatcttttgttatgtactataaggtgacatatttgtttggctc

SEQ ID NO: 3261 - DNA, 288 bp, Bos taurus
  Clone ID: 29-LIB3058-057-Q1-K1-H1
gtataattggaagatgctatatgaggatacaatctactgctgtcttttcaggattctagacgaaactgctctctattatctggacaggtcctcagaatggttggaatgatccggcatctttgaacacaggatgctagaagaacaacatgcctgaaaactttacgcctgctgctgccatcacatgagcaatcatgaaccgcttgcttgactgccagtctgagatgctgtagtagctaccttcaccgcactgaccggtttccagacatgctccattcccacagacacacc

SEQ ID NO: 3262 - DNA, 359 bp, Bos taurus
  Clone ID: 29-LIB3058-057-Q1-K1-H9
cttacccgatgaaagcgtgcttgcttgggcaatattggtaaatgaagcagaaatttttttcaatcatgcgtctgaatataggagtgtcttgtacgatgtatcacaagtattggtgctgtgtatcaaacaatgaattgtaactagtgtgtcggttcagaatacacagtgttagggttcttaacatatcaatgagccatattatatgtataactctagactttcacatagtggacagtagaatttcataaatttgctgcaattgaactgcttgcgctaacgtaggccagtaaacacagcatgtactcatataagtgaaaatttctgatcatctggaacattgatacttatgccaatttaca

SEQ ID NO: 3263 - DNA, 340 bp, Bos taurus
  Clone ID: 29-LIB3058-058-Q1-K1-H1
gtgactctgcccgtctttcactcactgagcacattctggagaggaatgggggatcagccccagtttctggcacttttcatggtgtcagcatctcaaggtgctgggtgttacactaggttgtataggttgtttgactatgtaagattctagctgagagctcagcctgtgatctaactcctgagtaaaatgtgcttccactctagttcacaaccacctgttgttaagcttattagacagtttatatttcttttacttattatgtagtttatatttccttttctactgtgagatcttttcttacaatagtgtctttctcggtaatttttaccttctgttaccc

SEQ ID NO: 3264 - DNA, 371 bp, Bos taurus
  Clone ID: 30-LIB3058-001-Q1-K1-H5
gttcatctcacttgcctctcctgggggttgctgggggcagggcctcatgctcggggcatgttgactaaaggtcttgtgagatcagctttgggtttttccttctgagacagcagaggcttgaattaaagagagtttagggactcccctactggtccagtgattaggactctgagcttccactgcaggaagcccaggtttgatccctggtgggggaactaagatcctgcaatctatgtactacaccccaaaaaagagtttatgtgggactttacaggggacagagctgatcagggaccagatggaacaggaactcttgtccccactaggcacgaaggggcaaggaaagcctggtggcaagagctcctggagct

SEQ ID NO: 3265 - DNA, 293 bp, Bos taurus
  Clone ID: 30-LIB3058-001-Q1-K1-H9
gtccttgcaaaattgtctcaagtgtttgttcttttgaaaattgacttcaataaaaagcgttctgaagtgtgtgaaaataagtaccaatataaaaaaaaatagctattggtacttagaattactatattaaaagttgcttatcttaatgcttaatttatcagagtttccacacatactctgattttcatgatcgctgacgttggatcattcatggattacaacgaacttacaaatgatgcatacttggatcgaacgaggcttgtgtcaatatcatgagcacatgcatatgcact

SEQ ID NO: 3266 - DNA, 394 bp, Bos taurus
  Clone ID: 30-LIB3058-004-Q1-K1-H5
agcggccgccctttttttttttttttttttttttttttttatgtttgtggttaatgggactggaacccaagaggtggccctgctcaagggtaggacgcacacacggagccaaggagacctgcaaagcccgggaaagccagggtcctttcagcaggaggcccttacactggagcggaaggccttccctcctcgagccctcaggagctgagaaagcaagagagggaactgctcccaactacccttacgccagcggcccttctccgtcactgctgaaaacagaccctgctgcccaacccctgccccacaccccggggcaacgcagggcatccacgagcaagcccgtgggcacaggtgggctcacttggtggctggtacctcactgtcgggcaggggc

SEQ ID NO: 3267 - DNA, 442 bp, Bos taurus
  Clone ID: 30-LIB3058-005-Q1-K1-H5
tggcaaattacttctttctgctcctgtaataagaataaatgtaaatttgaagactctttatgtaagaaaagtaaccctcaccaagctgctatggactaatactttgcttgcctaaatccgtgtcttttttttttcacatccatatatgacggtgtctagaaacccattatgaaaatcacttgaaaaactgttaagtcatatattacctttaaaagcctaatgccttttttttttcaattataaaagattataaatgtaaaccacaggctcgcctttaagtacactttcaatttctttgaattgttagttattgatggcctcacttataaacactaaattctgtcacctcctgtcattctattttgtattcattcagatgtgtattttcttgtgtatattataaaactatattttattatctcctacgtagataaatacttgc

SEQ ID NO: 3268 - DNA, 390 bp, Bos taurus
  Clone ID: 30-LIB3058-007-Q1-K1-H5
gaaaaagatgagtccgggaacccatgcacttttcaaagaactccttgctcttccctggtgggtattacactaattttctagaagtccagtggaaatctatgagttacgtattgaagattcttctaattcacaaaaggattgttagatgaggtaagcgagggtggaagccaacaatagaaatgcctacagggcctggatggataatgttaatgatagaaggtggtcaaggagaactaagagaggtggagacaatgacaggtcctgtctgaaagaggcagccgtgtctcagctccagctatcggtcgtagtccaagtgtggtgttgacaggacttgtgattctctgacatcatatgtcagatatttatatgaaaattcctgctgtataaatg

SEQ ID NO: 3269 - DNA, 372 bp, Bos taurus
  Clone ID: 30-LIB3058-009-Q1-K1-H5
aaagactggatatttcctgcataattttgttatatagaacagcttttagcagactttactaaagttatacaagcacatagttctccatttaatactatatgcccaaaataggggagtaactgcttgggtctgtttggcatcagggcttgtgaggccagaagagcaactctaatcctttgggggtagggagaagaagtttctagggctctggggggaattgcaagtgcctggggactggaggagcctcagcctcgggatggaaaatttggaaatcttagctcaagaagtaccatgtaccagcctcttcagaaagtggcccacaccaccctgaagcaacaaaattgtaggctaactaaagttgggtggacctgg

SEQ ID NO: 3270 - DNA, 416 bp, Bos taurus
  Clone ID: 30-LIB3058-011-Q1-K1-H9
cttattagggtttagggaatttcaacaaccaaatagaatatcgtttccaaaacaaaaggaatgcttcacaaatggcctagacttaggaataaatgccctgggcttacagaaagctcatttccctcactgcacacagggttcttgtagaggccaaaagaactccaggtattcctcagtattcaccaggaatcctctgattgacatgggaccttaatagtgtatcttcatctgtatttaggagttaaggtcatgaacctttataggacccaaaggtacaaaactgagtcaagtgattttcactaaacaagactaacaaatacagctaataacactaaacaacagtgttcttttccttattctcagcaaacttaaagtcacccatacgagagatttttttcaagtttttctctcccaca

SEQ ID NO: 3271 - DNA, 111 bp, Bos taurus
  Clone ID: 30-LIB3058-012-Q1-K1-H5
ctggctctgctgatgctgacgcgtgtgcggagccgggcctacgtggctcaagacccatgaccatgtggactgtggtttccacagccatgacctggggtgcaagggggcttt

SEQ ID NO: 3272 - DNA, 179 bp, Bos taurus
  unsure (33): Clone ID: 30-LIB3058-016-Q1-K1-H5
tcggtcgaaggaccagcattcaagctccagctntgctatgaggcctctctgtgacttaaggcatctgactgccttctcaaggcctcttttcctttttagacccagaaagctccacaactgctgtctgaggccctttggtctctgatacatcattctaggcttctagagtgaatcctggt

SEQ ID NO: 3273 - DNA, 438 bp, Bos taurus
  Clone ID: 30-LIB3058-016-Q1-K1-H9
gggtttcaacaggggaatcacctaattagatttatgctctggagcagcctggaagatggagtgctcggggccacgatgagcagctggattacagtgggtggtggtgtcataattctggtaagaaatgatcgtggcctggggtggagcattcaggatgggaagaagcagacagatcacggaagttactacagacagattcgagtagatggctgcaatctatagttaaatattgaaaaccagagccatttactgtagtggttctcagactttagcatgcataaaagatcgcctgggcatttgtaaaaatgtgtgttatgggaatgacttgaggaaatgtcagtggacagatttgggatgtaagtcaagaatctgtgttttcagcaagtgtccaggtgacactgatgcagacgggcctcagaccacaccgtctaaagcccc

SEQ ID NO: 3274 - DNA, 166 bp, Bos taurus
  Clone ID: 30-LIB3058-017-Q1-K1-H5
ctgataaaaaggcggattctttgcttttatgctttttccaattataggaccgaaggttgagcttgttgccgaggaggataggcctgtcctatctgaggtcgtggaaacaggcctggactaaaatgtacgagatatgggtggttaataagatgtagatgcctggcag

SEQ ID NO: 3275 - DNA, 346 bp, Bos taurus
  Clone ID: 30-LIB3058-019-Q1-K1-H5
cgcgagcggccgcccttttttttatatttatcatttttatctttttcagccatgaagcaggtgggatcctgcctcctaaacctgggataaaacccatacctcatgcattgtaaggtgaactcccctaaactgtggaggttcttaagggcaccaaaaacttttccactattctttttaatcaaaaaatggttaatagtaattttttcaatccaagtgtatggacttagttatcacaatactgctgttaatatagggttattttaaaatacgcaaacatcattggaagatcaaaatacaaaaccattactgaaacacaataggacggcactactagagcacccaaatg

SEQ ID NO: 3276 - DNA, 189 bp, Bos taurus
  Clone ID: 30-LIB3058-031-Q1-K1-H5
ccctgaggcgctgaatcagggcaaggttttggacgagtggtacagcctgagcgggcggcagggctacgacaaggagggcatgatcaacctggtgctgtcctacacgtcgctgccggctgccatgatgatgccgtctcagcccgtggtcctgatgcccaccgtgtaccatcagggtgtgggctacgtgcc

SEQ ID NO: 3277 - DNA, 438 bp, Bos taurus
  Clone ID: 30-LIB3058-035-Q1-K1-H5
gttttcttccaggaaagatttattgtattatttgagtgtatacatggttaacatggtcgttgtagggctagaaataacctgttttgtgagcatacaatctatttttaaccaataaatggactagctaattaaatatgattatatgtatctgtgatccaatggaagaaaggaagaaaccagtggctgatcatggaatatgttgagctcctaagatgacgtaagcatgaataatggtatgtatatagtacgagctttggaggtatgactatccgtcaggcgcccatgtcaagtgcagaagactatgctgctgatgccagaacacaggtgcttgatagatttgctagcctctgttgtcctgcattctcaagtcggcgctcggtaaccagaaggtacgacacctactcataactctacgtggaggcatgggcaacttcctgc

SEQ ID NO: 3278 - DNA, 96 bp, Bos taurus
  unsure (37): Clone ID: 30-LIB3058-036-Q1-K1-H5
cacgcgtgcgtgcgagttatcatttatatatcctttntgttgaatgtagctattattcatattggatattgtatatatgaatacactatattcttg

SEQ ID NO: 3279 - DNA, 330 bp, Bos taurus
  Clone ID: 30-LIB3058-037-Q1-K1-H5
gataaaagtagcatagacttttatgcatcttataccaatggcatcttccttggtttggtattggactattggtacctaacttgaaaagtaaaaccattggtgaaacctggtgaaaggggtaaagggaactttctggacttttctttccaatcttcattgatcaatattttttcaaaaggaaaaaatcagtggtaaccaaataaaaacatatgaactttcctaaaccccatggttccctttaaggttcaccattatctttttcaatttcttaacagacagattaattgaagatattctcttaaactaatattctccatatctacctttttt

SEQ ID NO: 3280 - DNA, 442 bp, Bos taurus
  Clone ID: 30-LIB3058-040-Q1-K1-H5
gcgcggacgcttggtatttaactcgttactcttaggatcacaggagtcaggggaaagtggtttaaaggtgatttctccagcacattttaagaaaagggaccaaaagttattttagcttcctcaatagattgcatgtcaagttgcttattaggataataaattaaatgcaatatatgtcttgtctttactatggcatctgtttaggagttgttcaaatcactgcagtagggctcggcaaataaaatcatgtaacctattatcatggatctaatgtactgtaactttatcaatgaaagttaaaaaatctcgaataacaagtacaaacattgaacaatgacctataaatatttgtaaaagtaaaatttttccaatagatttcattcttgtcattttgtaagacgaccctgcagtccacatatttgtaacttttttaataaaatag

SEQ ID NO: 3281 - DNA, 421 bp, Bos taurus
  Clone ID: 30-LIB3058-041-Q1-K1-H5
gcggagaggaattaagcaaagtcgtttgaagttggagaagaagaaacaagaaaacaagatgaggagagaccagctgaacgaccagtacttggaattgttagaaaaacagaggctgtactttaagaccgtgaaagagttcaaggaggaaggccgcaagaacgagatgttgctgtccaaagtgaaagccaaggcctcttgaacattcccagacatcattgcacatcattgatgtcttcgtctaaacgccatgtatcagctccgagatggtgaaatggttctggacactgcagcagagatgtaggtgtgatgatctcaacacgggatatttccttcctcctctttgctcacattgcatctccatggtggctgttgtctatgggatcggacggtgcagacattgtggcttggataacacccatcc

SEQ ID NO: 3282 - DNA, 391 bp, Bos taurus
  Clone ID: 30-LIB3058-042-Q1-K1-H5
gtggtaggccactccagacccccacatttttgtggtgagttacccggacagcccgtgacagggccacgaggagtggccctggcaggaggatgtgccgtgtggagctgtgagtgccctgaggccctggctccacatacctggctccacgtgcacccctggatgcacaccagggctccttgtccctcaggggtcccggcagccctgactgtggccagcggcccctccttcctggtgctgggacatctccccaccccagatggtgtcacctctgtgccttgttcgccccagacttcctggtgctgtggggctccgccgtgaccggacaagagcacgcagcctgatggccctgggcacctcgggaagaaatcagagtaaacactggttttgcacc

SEQ ID NO: 3283 - DNA, 436 bp, Bos taurus
  Clone ID: 30-LIB3058-044-Q1-K1-H9
cggacgcgtgggagaggatccctcattgtttgatgttgaagagaccatggtagagacgattgccctctgccagagaaattcacataatttgaaccaacagcagagagaggcactctggtttccgttattggaggcaatgatggcccctcagaagctgtctagttcagcttcacctcatccacactctgaagctctgaaatctttgaccatgcaagttctcaacagtatggcagcatttattgcccttccatccatcctgcagcgaatcttacaggacccagtttatggaaaaggaaaacttggagaaatccagggccttattctgggaatgttggatacctttaactatgaacagaccctgctggaaacgacaactagccttctaaaccaagatctccattggtcattgtgtaacctgagagcttcagttaccaga

SEQ ID NO: 3284 - DNA, 417 bp, Bos taurus
  Clone ID: 30-LIB3058-046-Q1-K1-H5
cggacgcgtggggccgaagaaacatgcttcccccaaaatcggggccccaaagcctcaggactcttcttccattctccctaatggcgcgcaactttccaaaacgcagccgctctgggatcggctccacagtcccccagttccaggttctggattatgttccatggcagcggtccaagcagagagccaagccatctgctctgcctccaatcccacaaactgtgggcactaagaaaagcgaaaggaagacctggtctaccatccagccagggtggcaatccaagcctaccttgtggatgacaagccagcccaggaatccactagagctgcgcagaggaaagttggactctgggaagacacaggccacaatccgactaatgagaacaatgctccggaaccggcgaacctcgtaccaggagc

SEQ ID NO: 3285 - DNA, 426 bp, Bos taurus
  Clone ID: 30-LIB3058-048-Q1-K1-H5
gtgacttaagaaatcaatctctcacacatcaccaaacctacacccttcagcaggggacgggcacttagtctggaaggatatatagcctgctgtgtctacaccggaacatgccgacgcttgcagacaaggcggaaaaggccttttgtaatggaaatcacgtgagggttcatcttctcttgagaatggcagtcaagaaatgaggtggttgacttgactcctgagcagttacaccaggaagagcgtcagtgagatgactgagccggagaagagacggttgtaatggtaatggtatgggggaaatgaacttgagtttaaacttgatttgagtttcagtgtctctgaattgaacatcctatgttgaaagaagatacatttgggggctccagaactacagtagaaaaggtatagagcaggcagtaaaatctt

SEQ ID NO: 3286 - DNA, 436 bp, Bos taurus
  Clone ID: 30-LIB3058-050-Q1-K1-H9
agacattgtggatgccttaaaggtgactgattgggtgctggcgggtatgtgtgcatccttctggacgaggcttatggaaacagactatttcagttcaccttcgtacagcacacattcctgctcatgacctctttggagaaagtgagaagcgtggtgctggagacgttcctgtgtcttgggcggctgaggtggtgatgactctccggtactcaggcctcccttcagtgccacttatacatctccatctattcatctatgcaagcttgtgtttcagtgcttcattttttacacctcgcatcccatgtgattcctttaacgtcaggtttaacattgatattatgaataatttttaaaccaaagtattgtataagtctgtgtgcttgtattcctgaatggttggaggcaaacaccaaccttgtcattttctcttaataaa

SEQ ID NO: 3287 - DNA, 414 bp, Bos taurus
  Clone ID: 30-LIB3058-051-Q1-K1-H5
caaaatgcctttattttccataagtacagattttaatccagaaatgtaaacatccctggatcagaagattcattatcatattatatggggcttaacaaatgatttccttctttgacactcattgtactgtaagaatcaatggtcagcttctgtgtgtgatgtgaagttctgaattcagaacaagagaattacaagagtggccgtgccttcaggttagagttgaatagtaatgggcagagtcctgaattaaagacacactattgcttcttcggtgagcagaactagagcacaagattctactatttggaatagatcagtgacgagaatccccctgagatgcctagactaaagcacctacaaggggacaatgcagaaggaataaaaggtgtcagttttgggaaaagtaaaggctgt

SEQ ID NO: 3288 - DNA, 384 bp, Bos taurus
  Clone ID: 30-LIB3058-052-Q1-K1-H5
aaaattgttaaagaagagtattttagttctgctgaaacctgttttcaagaatgtccagagacacggctttgactttgttgtttattcagagtaatttccttgcatcgaggaagataatctttcatgtttcactgtaaggaatggcttttcaagaataagttatgaccaagatagactgccagtacaagagcccactgatgataattatatgagaaaaagtaactgatgtgtccaccttaggacataagatgtctttgagttatttggactgcatgcatattgagaaaacttgaaagattcaagtttgtaatctatccgagctctggttatcaaaggctaaatttttagtgtaaaatagatctaccgagtattcttcagtatctc

SEQ ID NO: 3289 - DNA, 413 bp, Bos taurus
  Clone ID: 30-LIB3058-053-Q1-K1-H5
gacagtaaggacccaaagaagagtaaggtgtgggaaggagagaaaagaggggtgggcagacagaggaagaagtcaagaggatcagatcctgcctggatgggaacagccagaactttgaaatgaagagagagcaattcagagatggggctgcagagacaggagagaaagggcaaaaacagaactagaaggaagagggacctccttgctctctccagtctgtcctcaaaagatttacctaaaataaggaggtgcccagtggcatcccccaatcctggttctccggcactacatcctgaaacctcaccatgcccccatcagatttacctaaaataaggaggtgcccagtggcatcccccaatcctggttcttcggcactacatccttgaaccttaccatgcccccatcagagttgc

SEQ ID NO: 3290 - DNA, 394 bp, Bos taurus
  Clone ID: 30-LIB3058-054-Q1-K1-H9
caagtgggtgatcacttgctagagctgttgtaatccagccctcttaaccctgaatctctgcacacggggtgtggattagctgtgaggcagtaggaactcaagtatgtatgcgctgttgagcagaaagccatgggataggaaaacttgtgcagaagacctactacaagagtcaggacctaagtctagcttctaaacgaggccagaggtgctttgctatattaacaccaattcctgcactcagtcttgtgtgtgcaattcttgtgtaatttgggtataaacccataggtggttcaacttgggtcttttctctagccttggaggttgggcgcaagttcttcagcatggctttgcagtgacccatgtaactcagtggtaaggctttaagctcactctg

SEQ ID NO: 3291 - DNA, 408 bp, Bos taurus
  unsure (355): Clone ID: 31-LIB3058-004-Q1-K1-H11
gctgtttctgaggaatggcaggcggaacatgtaggtttggggaggcgaatagccgggggccttgatgcggcgaaggtagttccaacgcccgatataaaagggtctggaccctcatttctccaatcgttgataaacaaaactgctcactctcacctcctcgtgcagacgccgcagtgctaacctggttccgactgacaccgtgaggaaggaaaagaacgccgaaccgccctcactaggagagaagggagaaagccagcgctccccgaccccccttgacgcctgccgttcccgtgcgctccaccgaccgacgactcacgcgcggggttgcgggcgccaagacgcgagggcagccggnggcgcgtgcgtgcgggaagaccgggcgtgtggtgggggcggggaagggacaga

SEQ ID NO: 3292 - DNA, 451 bp, Bos taurus
  Clone ID: 31-LIB3058-004-Q1-K1-H3
gaagctccaacattatcgcactttcagcaaacattctgttatctgatgcacgagtttcataagttttggattgaagaggaccctatggacataatggaatttaatcgtgtgcgagagaaattccgcaagaggatcataaaacagctgcagaatccagacatggcattgtgcccgcactttgctgcctcagaaggtttaatcaacatgtagtcacccacacttgtttcaatggatagcccggaacacttgcctcattattgtgttagatctctgcttaggtcctggctcatgcactgaatgcactcagtgattgtatgcatgccttttgttacagtgttttcatatcttggtcataattaccagatcctcagataccaccatgtctggagtatctgtcctccagtgactgctcatattgtggcatcatgcagtgttacatcttgccttgaca

SEQ ID NO: 3293 - DNA, 59 bp, Bos taurus
  Clone ID: 31-LIB3058-005-Q1-K1-H3
tcgcacgttcggaattggaggtctaaagggcacttggcacccttgatgctacccacaaa

SEQ ID NO: 3294 - DNA, 452 bp, Bos taurus
  Clone ID: 31-LIB3058-006-Q1-K1-H11
aaattatgaaatctaataccttagttttctttttgtcagaaatcgagagtccagtataagtattatccatggatgacctgaagggggcgccgctgcagcactgcttctgtgatggtgctggaggcctctgatgctgtagtgcttcatatgctaaatgatataaaacgtggccctctctgcccaatcctgggtgtatgttaaagagaaaaagggtacagttgaaaaattgagatcagtcaactggaaatttttgataagattgagttgagcatttagtatttatcatttcaaataaggtcgcagtatataaattagaaaacccatatatattatgtctttactaggagatatagatctgggattgggtgaattgaagtggagaatgtgtaaagtggtaaaaaaaatcaggttaattataggaagaaaaaaagggagctattggcttattacta

SEQ ID NO: 3295 - DNA, 438 bp, Bos taurus
  unsure (396): Clone ID: 31-LIB3058-007-Q1-K1-H3
ttcccctggcttttagaggtcatactctgctccaccaactccaggctgatttctaggtattccttccgtgcacctgagtgtatttaacgccaaggttgagaagggggagaagtttatactcagataaagctggtcatatgagagtgtaatgtattacctcaacttgtgacttattctgtaacacttaaaaactagtttaatgtttatctcatcagactttaaagtgtcaagtcttgtttggattgtacattgaagctttacgtttttaaaaaccaattttgtatttttcttgcggaggtctctgcttttgtcgctctcccatgctaggcacacatctaggtagacacgaagcatctaaatttgtgggagctggatcagccgccagatgagatgcangaccaaggaccctcacctgctgaatagcttgcctcctgtatg

SEQ ID NO: 3296 - DNA, 346 bp, Bos taurus
  Clone ID: 31-LIB3058-008-Q1-K1-H3
ctcagtagcggcagtcagctcgaggtcactgtctaggggaaagggtagccggtccctgtgctgtctttctctgcttctcaccaccacccacacttcagcacccatgccccagtgtggtcctgaccttcccaggcagccctgacttggaatcagggcgagagaggcaggcagcagaggggccggggagagggagccagctaggcggggccggggcgtggggggtggtgcgggaggggcttcgagaggaactttggatgagccgtcaagtagtgatggagagcttgactgtgaattaattttatgccgtaaaagaccaatccaattctgtttgactatgtagcatctt

SEQ ID NO: 3297 - DNA, 399 bp, Bos taurus
  unsure (292),(316)...(317),(331),(362): unsure at all n locations; Clone ID: 31-LIB3058-009-Q1-K1-H3
cggacgcgtgggcggacgcgtgggctttgttgagagacctgggaaatggcctcaggtccgaagcagcattctcagttttgatgaagcctaaaatgtagaatagtctttcagtaggttgtgagctatcataaagcgggatatctctaaagccctggcgaagtaccatccttgcctttggcttgcaaactggaagaagcgggcgtgatttgccagcctcttcctgggactcgtgtgtttgttctcagctgatctgatcttcaccccacttcccgtccagtggacgttatgttgntggaaacatctccgtcatcatccnncatctgcccacccncaccccacttctgagtatcgccgtgcctttntattcatacttcagaggctgagctccatgcctgttca

SEQ ID NO: 3298 - DNA, 407 bp, Bos taurus
  Clone ID: 31-LIB3058-010-Q1-K1-H11
gttctagacgcgagcggctcctttttgattgactgatagaatgcactggtaagggcgattaacatgaaactatcactgactttaataaacataggcaggaattaacattgagatcataaataagaaactttatgacaattcataagtcctgaacacatataatataaaatcattagtcatccggaatcctctgattaacttgaggacttaatagtgtatcttcatctgtatttaggagttaaagtcatgaacctttataggacccaaaggtacaaaactgagtcaagtgattttcactaaacaagactaacatatacagctaataacactaaacaacagtgttcttttccttattctcagcatacttaaagtcacccatacgagagatttttttaagtttttctctc

SEQ ID NO: 3299 - DNA, 433 bp, Bos taurus
  Clone ID: 31-LIB3058-011-Q1-K1-H3
cttaaacctgtgtctttttagcttgtgttaatagattactcgactttagagattacagaaaattgggatgccagatttaaagggatatgtctgaattgcccactggtaggcattgtgacctaacagaagttggtagccagagctctaagcaaccatggtgcccagcctgtagactggtcttttaaccaggtttctgccctctcatcccctctgccttaagtccctgaaagcaaatttggttctacctctttgaaaggcatgtgtgggtccagcttattgtaaacttaggggaacaattagaagacatccaggagcatgggattgattccagattcacttctagggtttgaatctgcctggctagaagggtgtaggatcaagtttggtctatgagagaatcctaaagactaattcagtcagctgaatacctaaa

SEQ ID NO: 3300 - DNA, 64 bp, Bos taurus
  Clone ID: 31-LIB3058-013-Q1-K1-H11
gagataatgctggttcggatggtgagggtcatacccccctgtgaggtctgcatagaaccatctg

SEQ ID NO: 3301 - DNA, 324 bp, Bos taurus
  Clone ID: 31-LIB3058-015-Q1-K1-H3
actttttgcaaggtgcagtccataatatcttgtataggctctcaaaactgctgaaaatgttagcctgaagcacgactgtaatgtcgaccacgtggaaccagggcctcgtctgtaagcccatacagtaagaaagttgcacatcttattccaaacaagtattggtttgtctggtatctttagagccttactctgttgaagtgattgtcagctaaacattatgtctgttgtaactttgataagtatttccacttttgttatttattagtggtatctttttttgaagtgtcagatgtgactatttaaaataaaaggtcattataattt

SEQ ID NO: 3302 - DNA, 382 bp, Bos taurus
  Clone ID: 31-LIB3058-018-Q1-K1-H3
cgggtgttgagggtatttttttgttcagtcagggtctgagcatagtcaatcagggtatttctgagtaatctgaggctaaggtcatgtcctttcccgtgaggccttggttcagaaccccaggatggaccccaaatcacttcctattgatggggatggtggggtcctgtcccaggaagccgcctcctccctttctagagctagagagaggttgggtgggggtagggggccaggctggggcatttgtggggttggggggctcttcagggtgggagactggtgtctgggtcttgcctttaccctgagtggccttgaacaaaccccttgccccgactctgggcctccttctgcctgtgtcaggttctaattgtggagtctgagaacc

SEQ ID NO: 3303 - DNA, 432 bp, Bos taurus
  Clone ID: 31-LIB3058-019-Q1-K1-H11
atcgcgagcggccgccctttttttttttttttttttttttttttttgcatgcaggaaaagctttattaagtcatagaactattataattttttttaaacagggatgtagaatactcaaacattttaaatgacctatgaaacaactggcatatatttagtaagcaagatccactttaacaattctctctgctcccaccctcaatgctcaactataggacattcatttatttatcatgtttagtatttctgtctcacagccatctgtcagaccttttgctgcaaaaacgtgttttttaacaattaaatacacaatggggagatatggttagacatttacaggacttgaaatgttgaagaataatacacaataataggatcacaagaagggcagtggtatctttcaattcattttgctatttccagtctcttttt

SEQ ID NO: 3304 - DNA, 84 bp, Bos taurus
  Clone ID: 31-LIB3058-023-Q1-K1-H11
gtttcacctggtacacctcattcaacataagaaaatgagcgactacttacaggtaagggatttactatatgtgctcatggccat

SEQ ID NO: 3305 - DNA, 428 bp, Bos taurus
  Clone ID: 31-LIB3058-023-Q1-K1-H3
ccacgcgtccgcaacccacccggcatcctacgctagaggaggcgggaggccggggagcgagagtcgtacgcgcggcgcgctgggggtccgcgaggctcgtgacgtccgcgaaggcaagtgaggaaactgagaaatgtctttcctccaggatcccagtttcttcggcatgggaatgtggtccattggtgcgggggccataggagtcgctgccttggcactgctcctggccaacacagacatgtttctggccaagcccgagaaagcagcattggagtatctggaggacatagacctgaaaacactggagaaggatgcagtaacttttaaagcgaaggcgctctgggagaagaatggagctgtgattatggctgtgcggaagcccagggcttgcttttttttgctctgtcgggaggaggctacagatttgt

SEQ ID NO: 3306 - DNA, 430 bp, Bos taurus
  Clone ID: 31-LIB3058-025-Q1-K1-H3
atctgaaatcaccctagcagtaatttggtgatttttattattaggagtgttgtccctgtagagtggcgttccatgacattaatagaaaacccttttcccccacccctccccatcttgaaattctcttttttaggttcctgcacacaagaactgaccctaacacctctgctcacactggtaaatatatcttaacatctcttgaaagggaaatatccatatcagtttctttcacagcagaagaatgactacttttgaatggggaggaaagaagacatttttcttaatatcctttttgtcccatatctaaaatgtttatcttgattttgttttactttctcatttaaattttagcaacgtttttggggttgttcccgaaaacattacttccatttcaaaaaccatacctgatttaatataaactgctaatttt

SEQ ID NO: 3307 - DNA, 270 bp, Bos taurus
  Clone ID: 31-LIB3058-027-Q1-K1-H3
ggccgccctttttttttttttgtttgtggctttcattgcgaggggaaaattttccatgagctgaccagcaccggtcaccaccagtttaacccaaactgtgaatctgggccccaaccactctgaaccgtttaacatttgtcagcctcttcctcaccagtggtagtttcatggagttggctctcagaagaccaccctagactctggcggtgaacacccatttttcaatgattgctctgagcgtttggcccacaaatcaagctcttggtctgt

SEQ ID NO: 3308 - DNA, 441 bp, Bos taurus
  Clone ID: 31-LIB3058-029-Q1-K1-H11
aattaatctcatattcatgatcagtccttatgttaacatttctgattttgtgaaatatgaaatatttgatttgaatataatatgacttttaaccagaatattttgtactagtctgtattacatacatcattctttcaacctcttgtatggtcatctagatgaattatttgtgtacagaataaaatagttcatacactctctgggccaataaatctattaagatgtatctaagtcagaatatatatcgtggccccattcctgataataaaaaacatcaactcgattacccttatttttcttatcctagataatgagagaatatctcagtaaaatcaagcaaggcactataaaaattgatgagtatttgaacatacattcaaacactttgccttggagatctacttcctgagtgctagtaactaagcaaattataaaatcatt

SEQ ID NO: 3309 - DNA, 210 bp, Bos taurus
  Clone ID: 31-LIB3058-030-Q1-K1-H3
atcaggtagttggacgaaatcgtccatgactacatagcaggaaggaggtgttcctctggagttctatttggaccgccttacgagttcagtcagtttgaactgtgcagtttaagtgtgatgagaaaagtttcagatgtactctatcttttttaagaggagtaaatgaaatcagagtatgtaaagtctattcctcatgctagaggtccaaag

SEQ ID NO: 3310 - DNA, 388 bp, Bos taurus
  Clone ID: 31-LIB3058-031-Q1-K1-H3
gtgaaatgttcatcgagaatatttgaggaccaataacaggaaggaggtctttagctccaggagtgtggagtccgggagtttgccttggtggaccgcaggtgtagcgctatcacagagcctctttcctgtctcttccaatgcccgagtgtgctttcctttgaaaaacggggatcccactgtcaacgctgatccctgctgggggctttctccagaccacatctggaggcagggacataggtcatcacttcttggtccctcggccttgggaactttcatctgccttattaccatttgcgcccagggctttccttgctctgctcaccctgtctaatcccgccacccgctcccacttgctgtctgtgtaacacgcgcaacgtgggacctgctg

SEQ ID NO: 3311 - DNA, 422 bp, Bos taurus
  unsure (39): Clone ID: 31-LIB3058-035-Q1-K1-H11
tcggccaaagttcctgagttcctgtgggtcctatgtggntctcaagaaagggaatcagatttgctgattttaagaaggaacccagccaaagggaacacctggatggatgaaatgacttcagtggaggggcggatcctggaaactaagcggcgggtgcaggcatcctgagtaactagaggacacggcccacaagggactgcagctgagagatccccagagaaagaggaactattgagctataaaaaaagcaacgctggaatctgctgctcctagaggtcacagacaccagcttatctctccaccaacagaaagaaacctcatctcttctctcccttgctgcaactgctgctgcaacagcagccagcaaggaggcaagagggggtgagaaacagaaatgacactgaccctggtcccccttctct

SEQ ID NO: 3312 - DNA, 409 bp, Bos taurus
  unsure (288): Clone ID: 31-LIB3058-037-Q1-K1-H11
cttgcccgtgtcactgtccgccagccattgctggcacacggagagcctgccggtgtcccaggactcgggacccaggagaaagaaggagggttttagttgtctcgactgaatccgaatgggcagcagctggttggacatccgcaggacgctctggggtgaggagctgggtcagcagggcaggggcggcccacctgccggggcttgaggtagaggctgtgcacgcggtctgctgggcggtccctggcctgggttcctctgagattcagggtctagggtgtcaagtgcttnctcagtcttgtctgtggcatctgggcaaccccggctgtgagcacctgtgcccccgagggtgcgtagccctccccatcagcccccgtagcacctttccctttggtgacagcaccccccgatg

SEQ ID NO: 3313 - DNA, 328 bp, Bos taurus
  Clone ID: 31-LIB3058-043-Q1-K1-H3
atagcactagctcagtgctgggggaattttatatggaagaggtatggctctggcccctaataagcttactgactgaagcacaaggaacaaaatgccaggatataatctaaatgctacattatgtcaggatccaggaacacagagaatgggagacctataaaaacaggacgagtcaagaagggcttcactacagaggtgagacatgacaagagaattagaggagactgtgccaggcaaacgaatggcgaaggttgcagtttgacttctgaatggaatgatgacagagctcgcagctagagatcatggcttgtctgcagagaaccagact

SEQ ID NO: 3314 - DNA, 89 bp, Bos taurus
  Clone ID: 31-LIB3058-044-Q1-K1-H3
ttgctcctgatgctgctccatcggtctgcgggcttgtcaccctaggctccaggatcattaaacgctgtcagacaggacccaccctacac

SEQ ID NO: 3315 - DNA, 338 bp, Bos taurus
  Clone ID: 31-LIB3058-048-Q1-K1-H3
gagagcagtggacacatctcagcatgtctgtctagagagttgcgaatctaaacctgggacaggctggggccatgaggcagaaacagcagcctctgccaacaccggaacaagccgacgcttccagacaaggcggaaaaggccttttgtaatggaaatcacgtgagggttcatcttctcttgagaatggcagtcaagaaatgaggtggttgacttgactcctgagcagttacaccaggaagagcgtcagtgagatgactgagccggagaagagacggttgtaatggtaatggtatgggggaaatgaacttgagtttaaacttgaattgaggttcaatggc

SEQ ID NO: 3316 - DNA, 426 bp, Bos taurus
  Clone ID: 31-LIB3058-049-Q1-K1-H3
gcaggtacctgttgaaggtggctgagctgtttgaaaaacttaggaaagtggagagtcgagtctcctcagatgaagacttaaagctgacggagctcctgcgatactacatgctcaacatagaggctgccaaggatctcttataccgacgcaccaaagccctcatcgactatgagaattcaaataaagcgttggataaggcccggttaaagagcagagatgtcaagctggccgaggcgcaccagcaggaatgctgccagaagtttgaacaactctctgaatctgcaaaagatgagctgatcaatttcaaacggaagagagtggcagcgttcaggaagaatctaattgaaatgtctgaactggaaataaagcatgccaggaacaatgtgtccctcctgcaaagctgcatcgacctgttcaagaacaact

SEQ ID NO: 3317 - DNA, 131 bp, Bos taurus
  Clone ID: 31-LIB3058-052-Q1-K1-H11
tcggcgtcattgagctggttgtgactgagtgacctccattcgtggccacacccaacagtgagagctgtgaccacgggtctcaaggaaagtatgcactgttcttgagtattgaaataaagtaatacactttt

SEQ ID NO: 3318 - DNA, 423 bp, Bos taurus
  Clone ID: 31-LIB3058-054-Q1-K1-H3
cccagtcagaagaagaggagctgactgcatcttcacatctgcaggacgcaggtctccccttggtccatggatctgcctccgaggccagccctgagcttcactcagaagaagagacagcatcctcaccactgctggacacaggtctacccttggtgcagcgatctgcctcctatgccagctcatagccgcagtcagaagaggagcagacagcctccgcatccctgcaggacgcaggacttcccttggtccagggatctgcatctaacgtcagccctgatccccagtcagaagaagaagacctgacagcctccgcacccgtgaaggatgcaggtcttcgcttggtccagggatatgcctccgatgccagctccaaaccacagtcagaataagaggagctgacggcctcctcaactctgcaggacg

SEQ ID NO: 3319 - DNA, 372 bp, Bos taurus
  Clone ID: 31-LIB3058-057-Q1-K1-H11
gttctttcagtgtgttcaaaccaactagaatgtcaaacgctttgaagtaaaggttataaggaatgtagatgtcagagttgcgctgataaacactgagtggaatgaatataaacagtggatgcattaggaggcacttaggatgttatgtactcaagacaacttaggggaaattaccttgatatctttcaaaagcagagtatgtgtgactgcaaactgtttgatatctcttcacttgctctgcatcctctgggtgcatttgtgtgtaccaaccccattgttaacaacccttccttccctacttaaccttgtaaaaattgagtcaatttcaagtccaacacccttatgtctatgacctttaatctcagtgcttat

SEQ ID NO: 3320 - DNA, 415 bp, Bos taurus
  Clone ID: 31-LIB3058-057-Q1-K1-H3
atacagtagtacgtttttacaaaaccctttctaagccagcaattcaatttgctcctttaatctctcctattaccattgattactttcaaatcatcactcacactgttttctgcctcataatgcaggacattgagtattccatgatggaatattcatgccacatgatgtgctgtttcctctgcccttaaatgcccttccctaattcttggtcttgtgactgtgtgatcccacttgttttttatacactatgagaaaatgtgattttctaccagtaggtttcatcctgctgcttctattcccagttaccttacctcttctaaactatgaccatacatgacactgattggtttgggagctgctttacattagattccaggcccttctaagactctagtgctactcactttgatttctc

SEQ ID NO: 3321 - DNA, 337 bp, Bos taurus
  Clone ID: 32-LIB3058-001-Q1-K1-H11
cacaatgtgtggtgtacagagaagatttctgatagatattcaacgtcttgataaactaacatataacgatgctaacgattgattcgaactgacataatgtactactggattgatacggcgcacatttgatgtcttaggaatggactagtcataagttggtccacaaatctactgtatgatcatccttgtactatcaagaccaacaccgggaattaagaatattggatctgatgcatacgtcatctgcactggaaaacatttctgactgccattcatatcgacagtgcattgcatgcagacattgtgaaatcatgctgagtcttgtttgaattcaaat

SEQ ID NO: 3322 - DNA, 429 bp, Bos taurus
  Clone ID: 32-LIB3058-003-Q1-K1-H11
cccacgcgtccgcccacgcgtccgcttccctccaagcagccagcagtccctacccacatgcagaccaccatccttccctgctcctgtgcatgagtgcccatgtgcacagcaccatgcaaaagccaggcggtctttagtttcttgagatggtcactatgacttactgtttaataagacaggttatagagaactaaacagaacactgggcctcactttcctcctcagttgtgaccaggtatgaccatgccttgctgtgcgctgtccaggccggcccctccctggacataagggccaccagtgacacaggctggaggtgagtgactttcactggttctgggcttctagggccccttgacgtgacccagagacggtacagggagccctggagagcagggctggaacgtgtggcctctgaggcccagcacacac

SEQ ID NO: 3323 - DNA, 438 bp, Bos taurus
  Clone ID: 32-LIB3058-007-Q1-K1-H7
cggacgcgtgggcaaatcagcatttatagtaacattggtatagtgcagtagttttagtttgtttccttttagaaaagctgcaggaaccaagaaaggaaacatagtggttttatttgttatgcccctattatttgaagattttctttttccttaatagaggctacttcctctcaatattcaaaagttatactctggtcaacatttttgctaatgtaaaatatgtctctttacccattgctgaatttgaaaggatgttgaatttccaatcactgaaaaaaagaaaaaagcaaacgcacttcagcaacatcaaaacatttctgcttctcatagtaaaatctaagtgtttttgtagattataaagaaaatatttcttagcaatgaaattactgttaaaacaatttcagtcagatacttttgtgaatagaaaatgtctgtagt

SEQ ID NO: 3324 - DNA, 398 bp, Bos taurus
  unsure (272): Clone ID: 32-LIB3058-008-Q1-K1-H11
tgcatcggccagagataagctgtcatggctgctggaggtaccacctggacaaggtgtttggggcacactgcctccaccaatgaggatctctgtggacagcttcaagctggagacattgtctggcctctactgcccactgggtagagacacctggatacattccagcccccactgacagcccctcacactcatcctggggcagccagtgggtaagtggagagagcatcatttcttccctagagaaccgtacttacctcagctcctagggcctncagccccacagctccactatggtgactcggtgaaaggggaccagtgccagaagaaaggggctgtagacccccccgttccctaccccatggccacagggcaactggcaataagactagtatacattg

SEQ ID NO: 3325 - DNA, 349 bp, Bos taurus
  Clone ID: 32-LIB3058-011-Q1-K1-H11
attgttctgaaactgctatatcagggatagatctgagagaagtgccctgttgtagggtcatttgtaaggagctgatcactgacttaactacagatgggcaggaatttcccttgggggcagaaataggaaactttatgacaatccctgggtcctggccaggttttttttggtaccattccattacccactccccttgggactcatagcaacccagagtttttcatgtttaatacacactctctgggttccctgcctagaatagatgaccgagaggagaggcctctgtgccagcagccctgcccctcacctgtttttgtgagtgaacttgggcaagttcttggtgcatttt

SEQ ID NO: 3326 - DNA, 338 bp, Bos taurus
  Clone ID: 32-LIB3058-014-Q1-K1-H11
gagataattgctggtttggatggtgagggtcatacccccctgtgaggtctgcatagaacaatctgttgggacaactgggcatccaggccgcctggcacttggcaaacccgggatgcatccgcgatccaggttcccagccaggcagggcttcccaccttagatctcgggggctctcctgggaattctgcgtttgacttactgccttagacagtaggtataatggacatagccaggaccctggagctggacaggcatgtggtttaaactcatgggcacagtcaagttctgcctgctgggcagagcatggcacccacctagcaggggctgtgtgaggatct

SEQ ID NO: 3327 - DNA, 148 bp, Bos taurus
  Clone ID: 32-LIB3058-016-Q1-K1-H11
agaatacaacaagcaaattatttatttagaattatactatggagcagcatgggggatggattgctctgaggcacggttaccatctgaattacaaaaccatggtgcttaatccttacttgatcaaatgatacatacctgacctggagca

SEQ ID NO: 3328 - DNA, 454 bp, Bos taurus
  Clone ID: 32-LIB3058-019-Q1-K1-H7
cccacgcgtccgcggacgcgtgggggactagttctagatcgcgagcggacgcccttttttttttgttttgataagaatatttttattgtattattaaataccatcttttttccactgttacaaatttgtagatactacatgaatgatgatacataatttatattttatagtttgccgatatgatgtatttacacatgcagttagtaccaatgtcatgctacatttccttaggagatgctcgttcaaaaaaaaaaaacgtgagcaaaatgtgagcagcttatctactgtaggaaaatatttctggagggtggaatgtataccaacctgcacctgcatgttcagtattaacaatattagattaatttagactcctgggtcatgttcccttatgttttaaaataatgcacataatttaagccacacacttagaaaagtttactacttttttttctac

SEQ ID NO: 3329 - DNA, 468 bp, Bos taurus
  Clone ID: 32-LIB3058-021-Q1-K1-H7
gttctagatcgcgagcggacgacctttttttgtcatgtctacatgattagactgtattaggaatggatactcaatgtaatgtgacactatcaagctcaagctaccattaagaaagtggcaatatattgactcaggatctcaaagctggctgttacagcattactgtgtaaagacttttgaagggacagaagtgaagaacataaactgtaattttgtacagataccaacttctgaaaaaaaaagctagcgtttctacaactagcattgaatgcagtccaacttgcagtagtactactcttcaatacacaagcagctttgctgctgcttttatggacgtgggtaccaattgcttttgtaatatggtaaaaatgtgagctagcacttttgcgtttattctgattctatttttaacaagtattcagattgacaaatatgattttaatgctttaatctcatgtagtttggttt

SEQ ID NO: 3330 - DNA, 444 bp, Bos taurus
  unsure (421): Clone ID: 32-LIB3058-022-Q1-K1-H7
ccaggatgaggaaggatctgcagatgctggaagctcttctttttcataacatttaggggaattatttgcaagattccctaggtttattctaagaaattctactctctataaaagaagcctgagactttcgggttccttcctttctctgccctgacctggagggtcctagggagagcaatgcctctccaaggggcctcagatgcctgagccgatggggagggaccaggaaccacctttgtcccaggggcccatcttcatatgctctttcttcccaagcctcttaagaatctcttccagaggcctcatggagctacctcccccaaggcgatgaggttgggaacaaaatggggcttctgcgagtagaggtgggagaccggtgagatgtcccctcggcaccctgctttctagcatggtacctctnctgcaccatggggctcaagccct

SEQ ID NO: 3331 - DNA, 363 bp, Bos taurus
  Clone ID: 32-LIB3058-025-Q1-K1-H7
tcgatctgaaatcaccctttcagtaattcgttgattttcattattaggagtggtgtccctagggagtggcgttccatgtccttaatagaaaacccttttcccccacccctccccatcttgaaattctcttttttaggttcctgcacacaataactgaccctaacacctctgctcacactggtaaatatatcttaacatctcttgaaagggaaatatccatatcagtttcttttacagcccaagaatgactacttgtgaatggggaggaaagaatacatttttcttaatatccttcttgtcccatatctaaaacgtttatttttgttttgttttactttctcagttaaattttaccaacctttt

SEQ ID NO: 3332 - DNA, 418 bp, Bos taurus
  Clone ID: 32-LIB3058-028-Q1-K1-H11
caaaaacagtcacttactttactgtatgtacttttatagacaacaaatgtgatagttggaacatagtgacatttctgaaggtcatgtgtacatggtaagtcaggatgaaggcagatttaaattaagacactctgagatgaaataaaagcaaggagttgataatagtcatctttatcatagcaatatcttgagaactaaattttaatggaatttgaagggattcaaactactttgcttccatacctcactctgctatgcagaaggcagaatggcgctgagtgaaccatctactgtagtaacaaccaacttgaagaagttttatggtttggccatgggtaaactttggcaaaagtgtttgtggagctgtcattatttatctttgaagtcagtttcatccatcaataaaaatggattattt

SEQ ID NO: 3333 - DNA, 280 bp, Bos taurus
  Clone ID: 32-LIB3058-028-Q1-K1-H7
agagcacatgctgtggctggcagtaaggctgtaagtcagcaagtttaccatggccagaatctgtacgttgagtgtagaatggttctgagggtgatctccattgatgccctggctgtcatggtaccgggtgacttggaagatgcagttaagtaactcggctgaaatcacttatcattttgtgccaacatgtgcttttcgtgcctggtaggaattggtctcttttttaggtgccctgttctcctgccataaatggtgaatgatttgtgagaagtgcaagcca

SEQ ID NO: 3334 - DNA, 428 bp, Bos taurus
  Clone ID: 32-LIB3058-039-Q1-K1-H11
aaaagaaaatgtagtgaggttttctgtttcacacatccaaaatcatgcatttatggactcaaaatcttttcagttttttgaattatctatagctattttattagcatgggttgtcaaaaatctcccagatttaagagtaaagaagagaaaagtaatataaacaaagagatgaggggaagaaaatggcttcctttttaaggtgttattaattgttcatatagtttatgacctaaaaatgatatttatttttaaaaatccaactttggtacctgtaacatagaaacattgccttttctatacattcctcatcattgtttgcccaaaaaattattttaagagtgtatgagaccagattaaatatccatattcagtttggtcaaatttttaaaactaaatatttaaatgagactctatcttttgtgtatttg

SEQ ID NO: 3335 - DNA, 441 bp, Bos taurus
  Clone ID: 32-LIB3058-045-Q1-K1-H7
gtgtttgtagcttagagccctgtggggtggtggacagcacttacattttgacctcgcgttctaacatttctgggctgtttagttctgtaactaaaaaaatgttcaagttgaaagttttactaggttttaatgactatattgcttgaaaatcaaatgaaggtattaaataggttaaactacaggcccaaataagatcctgaaattattattttaaatgatttcaaatataggaagtaaatgtgcttttatttaaaccaatgctaaatacattaactgaatgtagaaatctgggggaaaaaaattatttctttaaaggctttctttaaacaagaatattgaattttataagtcagaagttcaagtctatttttgtttatttttcagcacacctcaagaaatttcgatgtatgcacaagtaactcatcaaaaggctgaggagat

SEQ ID NO: 3336 - DNA, 433 bp, Bos taurus
  Clone ID: 32-LIB3058-046-Q1-K1-H11
ctgcaattgaaagatattccaaagggatttaaagactgcactctgaggttcccttttcttgatcttagctctgtagttatacatttgtctaccttttctagttcatagccagatgattgatccaaattacctagtccatcattattggaatggttcctttatatagttctcttggaagtgggaacctctttctgtatttcataattttgcaaatatactgttctgtttgggcctgatcttcatttttatttgctttggttttcatttcattttgggggactatttttatgtttatgattttcattcatcattagataataaatgtatgcattctttatagattattttaaaatcttctaaataatacagtattaaggatattcttaaaattaaacttccttatttgttttttaggataactttccatttgatc

SEQ ID NO: 3337 - DNA, 414 bp, Bos taurus
  unsure (391): Clone ID: 32-LIB3058-046-Q1-K1-H7
cgtgcatgcagatcccatcatgtattgtcgggctgacgagactccgggactcttcatgactggtgggggtttagctgatgtgcatttggttaaagtgtaaagtccgacccgttgtgaggctctcacacagcctgagagcctaccagggcagaggccttgaccacatgagcctggcagagggggctcgtggcagagactgctgtggcgtcgccaggtctgagcccacctgctggagggggaccatccagaccctcggtgctctaggcctgtgaagaagacgggtcatgtttgacttgactctcatccctgttagtgatacgcaggctccggcgtgggtttcagaccagtggcacttgctgctggtccagggctgaccgagcagacggctgancacccacacgtgtgtgcacacat

SEQ ID NO: 3338 - DNA, 412 bp, Bos taurus
  Clone ID: 32-LIB3058-047-Q1-K1-H11
ctctgctatcaaggcgctgcgcgtgctttacccgtccatggttgtcctggaggtggcctgtgagcccattcgccggtacctgcggacgcgggaggacacagtgcggcagatcgtggcggggctgacgggggactcggatgggacgggcgacttggctgttgagctgtccaagacggaccctgcgagcctagagaccgggctggacagtgaggacgactctggggagccggaggactgggtccctgaccctgtggacgcagatccagggaagtccagctccaagcggcgctcctgagacatcatcagcctgctggtcagcatctatggcagcaaggacctcttcatcaatgagtaccgttcgctgctagccgatcgactgctgcaccagttcagcttcagccctgatcgggag

SEQ ID NO: 3339 - DNA, 65 bp, Bos taurus
  Clone ID: 32-LIB3058-050-Q1-K1-H7
cccacgcggacgaaaagacaaaagacacaccccgagagaaggaaacgccagaagggaaccaggaa

SEQ ID NO: 3340 - DNA, 446 bp, Bos taurus
  Clone ID: 32-LIB3058-051-Q1-K1-H7
tttcgtgattcttttgacagtgccagtgtcccgtttccctgctcttgtgcattgttctgtagctgatgtgcatgtgagaattcaggtcagccgggcctgctggctgcttgcagtggggatgagggagcttcctgacacggcctgctgacgtgtgtggccgtgtggagctgaacctgagctcataagtgcactgtgcgtgagatctaggacagacaggtgtcttactttcctggagggagtgtccacttctagttggggcaggacccttgcttcaccttcacagaaaggtatttgaactggcatatccctttcatgttcacacactttcccacgttgagagggcaccccgtgtgcccacttgtgtacatccttaccagagccgtgaggttatatcagtcatagcttgtatgtcattcattttcaattttaaatgtacgtcatttcat

SEQ ID NO: 3341 - DNA, 159 bp, Bos taurus
  Clone ID: 32-LIB3058-056-Q1-K1-H11
acgacgccgcaactggatatttgtgcaccttacggcccatggcaaactcagagttctaaccacgcgtctaaaggaaagtattcactgttcttgagtatcgaaataatagtaatacacttttaaaaaaaacgaacaattaaaaaaggtctgtccttttaa

SEQ ID NO: 3342 - DNA, 171 bp, Bos taurus
  Clone ID: 32-LIB3058-058-Q1-K1-H11
cggacgcgtgggttttttttttttgaaaaccaactgtgaatgtaaagcattactactagagcatatgattcttggacaagaatgagaatcgcttataaagcgtaaaatcataaaaccagcagactcaaatacataatgaaactgtcatgcaattctacatatatcctaatg

SEQ ID NO: 3343 - DNA, 423 bp, Bos taurus
  unsure (393): Clone ID: 33-LIB3058-004-Q1-K1-A10
ggagagtccgtgggatctctttacggcctctggactggaggccgagcccccgcccgcggccgagccccgcgcccggcgtctccgcccggggtgctctccgcagtttcctggcttggaagcctcgggaacatggcgaggcagcggtggtttaacgggaaggacggtgactgttagcctgtgaacgaaagcgagagtgagccgcctcacgctccggaccaagagtgatcttgaacttgtggctgctactagatttttgcccacacctgctcgtatgctgcggcttctccactggagtggggccagggtgaccgtggacttgccgcaagtcagacggctgcaggtcacagcaggtccagtctgtccacctttgagcggcggcggcatgtccttccncaccctcgatgacccccgctggcttgaccc

SEQ ID NO: 3344 - DNA, 358 bp, Bos taurus
  Clone ID: 33-LIB3058-008-Q1-K1-A2
gtcaccggcccggcgccccggaggagcccccgcggctggcggatgctgcccgggcctcgcctggaggctcagcgctggggcggcgcctctgcaggttcatagaaataagtgcaattttctacaacccctgagacaattcaaagggaagcagcgttactagttaactagttaagtgctgagttactagtcatggcatagatcacccggctcaacgtgtgtccaggatcctctgcctcagctgcccagccctgccgtatccgatcaccagcaccagggcggtccgtctgcccggcctggctccgtaccggccgagtccctgatggtctgtgcttgcgctgccctcgcccctgcttccctg

SEQ ID NO: 3345 - DNA, 210 bp, Bos taurus
  Clone ID: 33-LIB3058-010-Q1-K1-A10
gttctagatcgcgagcggccgcccttttttttttttattttctatgacataatattgacggggatcattgttcagagctcgtcactggctctataccaaaggcgcatggattttactcgggggcatgacccggaaactttatgaccattcctgggtcctggccagtatttctatgggaccatttcattactcactacccttgggactcat

SEQ ID NO: 3346 - DNA, 287 bp, Bos taurus
  Clone ID: 33-LIB3058-011-Q1-K1-A2
tcgcggacgcgtgggtctagatcgcgagcggccgccctttttttttttttttttttttttttttttccaggtgtggatttttattttcacaaagagacaacaatgccttcccacatacaagtatttacaaaacccaactgattcaccaatctagaacctgggtttttgttttttgtttttccacttctcaacatagttgggaatatggaaacattattaccaacacaattcccagagatggaatttatccatcaaacagtgcagattacctaaaagtgcacttacct

SEQ ID NO: 3347 - DNA, 195 bp, Bos taurus
  Clone ID: 33-LIB3058-013-Q1-K1-A10
gagataattgctggtttgaatggtgaggttaatacccccttgtaaggcctgcttagagcattctgttggaacacctggccttccaggccgcttgcctctggaaaaacccggtatgcttccgatacccaggctccaacccaggcaggtcttcacaccttaaatctgggggtctctcctggaaattgtgcgttagac

SEQ ID NO: 3348 - DNA, 338 bp, Bos taurus
  Clone ID: 33-LIB3058-015-Q1-K1-A10
agccctgcccacctttgccccagtctgaacaacccccagggatagagctggtctctggactgggggcccccagcctgggctgggcaagctggaccctctcctccagtctaccagctcctgtccccaaggcttggcccctagtccacagaggggaccccgcacaaacctatttattaacttgccgagcacaagcggctctgtccacccctccgtctgtccgtccagcctcccccgctgctgttctcttgccttggccagccttgcaggaggatcgggctctcctgccccccatattgagcccaggaatcctagaacggggggtggccctgagtgctgac

SEQ ID NO: 3349 - DNA, 455 bp, Bos taurus
  Clone ID: 33-LIB3058-018-Q1-K1-A2
ctctgctgtcctggcgggaagccctgactctggggtctcggaagcagttcccacccgtgccccggagctctgaagtcggcacacctcgtcggggttgtcagggtgcccagtgggggccccatgcccctccctgcacaagctttctagatgtggaagcacaaagtggttgagatgagagcacaaggcaggtccagcagccagcgacctgggcaagcccgctgggagatcccgccccggggggcgctgaggcctttccccctcccagggctcatcctgcagtgctgcccctctgaaccaccccaaggcttgaggctggccctgcaggcaggcagcgtcggagggctgggccccagagtggcaccctcttccccaccatgtcctgaatctttgaatgcctgaccccagccctcctgacttggatcctcgccccccccacccccccaggccgagccctg

SEQ ID NO: 3350 - DNA, 455 bp, Bos taurus
  Clone ID: 33-LIB3058-019-Q1-K1-A2
tttgtgtgctgcgatctggccgaactgctcctgaagttaaagaagttcaacaaagcagaaaaagttttgaagcaggcactggatcatgactttgtcaaagacatcccatccatgatgaatgatgtcaagtgcttacttttgctggccaaggtttacaagagtcataaaaaagaagatgtgacggaaactttgaacaaggccatggacctccagtctcggatcctgaagcgtgttcccctggagcgaccggaaatgatcccctcccagaagcaactggcagcctccatctgcatccagtttggggaatactacctggcagagaaggagtatgccaaggcagtgcagtcttataaagatgccctctcctacacgcctattaacaataaggtggtgctggagctggcgaggctctacctgctgcagggacacctggacctgtgtgagcagcactgtgc

SEQ ID NO: 3351 - DNA, 424 bp, Bos taurus
  unsure (366),(374): unsure at all n locations; Clone ID: 33-LIB3058-021-Q1-K1-A2
gcccatgctacaggaagagactgtattagaaaatggatacacaaggtcaggtgacactatgaagctcaagctaccaaaaagaaagtggcaatatattgactcaggatctcaaagctgggtgttttagcattactgtgtaaagacttttgaagggacagaagtgaagaaaataagcttcaattttgtacagataccaacttctgaaaaaaaaagctggtgtttttacaactagcattgaatgcagtccaacttgcagtagtactactcttcaatagacaagcagctttgttgctgcttttatggacgtgggtaccaattgcttttgtaatatggtaaaaatgtgagctagcacttctgcgtttattntgattttntttttaacatgtattcagattgagaaatatgattttaatgctttaatctc

SEQ ID NO: 3352 - DNA, 238 bp, Bos taurus
  Clone ID: 33-LIB3058-022-Q1-K1-A2
cgtacgcctatgcagaaaggagctggactaggcaggctctttatagcctgagtcccccaagagcggttgcccgatcgacactcgtactgactgggcggagtcagaatcttgggccatcggtataacagaggagccaacataatctgacaccttgctatctcacctggtgaagtgataccagtccagcccagagaggatgctgtcagaagcagctgaagctgatgccaaactactgctg

SEQ ID NO: 3353 - DNA, 111 bp, Bos taurus
  Clone ID: 33-LIB3058-023-Q1-K1-A10
tcgaacacaactgtgggtctccattgaggagcccatggcacaatgggtgagagtggaggggcctggtgtccgtctgatgccagaccaagtctgctggcaaatacgctaggc

SEQ ID NO: 3354 - DNA, 425 bp, Bos taurus
  unsure (321): Clone ID: 33-LIB3058-023-Q1-K1-A2
caacccacccggcatcctacgctagaggaggcgggaggccggggagcgagagtcgtacgcgcggcgcgctgggggtccgcgaggctcgtgacgtccgcgaaggcaagtgaggaaactgagaaatgtctttcctccaggatcccagtttcttcggcatgggaatgtggtccattggtgcgggggccataggagtcgctgccttggcactgctcctggccaacacagacatgtttctggccaagcccgagaaagcagcattggagtatctggaggacatagacctgaaaacactggagaaggatgcagtaacttttaaagcgnaagcgctctgggagaagaatggagctgtgattatggctgtgcggaggccaaggctgctttttccccccctctgtcgggaggaggctacagatttgtcctccctg

SEQ ID NO: 3355 - DNA, 421 bp, Bos taurus
  Clone ID: 33-LIB3058-024-Q1-K1-A2
tctagatcgcgagcggccgccctttttttttttttttttcaaagttttgaaatgtacgttaattggcttgtttccggtattaccaatccatgcctggtctctagggttctcctcctcccctcgactgggggggttccacacttgggacaggtgcaacaagggggcacagtcaggcaggagtctgccctgtgaggggttcctagccgctgaggccccatccacaagcaggcgcgcatcatgacaccctctctaatgggaaaggccgggccccctgctcctccccaccagtgtgcatcacgtcctcgagagggtgggcgaaagggtgggtgtcagccttcaggtcactgcagcgttggcgcgtacagcgaggcatggtcgaacaatgggttccgaaccttcaatctttccgttggggccaggc

SEQ ID NO: 3356 - DNA, 281 bp, Bos taurus
  Clone ID: 33-LIB3058-026-Q1-K1-A2
aaaggtttgtgtcaccattactgttttactatgtctgtttatatgctcacagatagatttgtaactccctttggcagaatatttaaccaatttttggccttaatctgacttccatgacacatttatataatctacatctatactacaaacttagatgagccatactttttaaacccttcactttacaatgcacagtaaattcctaataatggttttattactgaaggatcagaacttctagtatgaccacattaatatttactgtttaagaaacatattaa

SEQ ID NO: 3357 - DNA, 284 bp, Bos taurus
  Clone ID: 33-LIB3058-028-Q1-K1-A2
agagcacatgctgtggctggcagtaaggctgtaagtcagcaagtttaccatgtccagaatctgtacgtggagtgtagaatggttctgagggtgatctccattgatgccctggctgtcatggtaccgggtgacttggaagatgcagttaagtaactcggctgaaatcacttatcattttgtgccaacatgtgcttttcgtgcctggtaggaattggtctcttttttaggtgccctgttctcctgccataaatggtgaatgatttgtgagaagtgcaagccacatt

SEQ ID NO: 3358 - DNA, 101 bp, Bos taurus
  Clone ID: 33-LIB3058-031-Q1-K1-A2
atcgcgagcggccgccctttttttttttttttcttatcctctcatcattgacgctatggatggatagacattatagtaggccctctcaaaatatttataat

SEQ ID NO: 3359 - DNA, 394 bp, Bos taurus
  Clone ID: 33-LIB3058-034-Q1-K1-A10
ggaaccagctgggtcctgccctctgcctttcctcattgctccccccactcataccctctatgaacttaaaggaaaaccactttgctccatctcttttcccctcccttagagggggaaagtgccggctggggctgagaactgagcacccgagcctggggctggctccccggggtccccgacgaagctgagagcccctccctgtgacctccgagaggccagcgcctgcggtgtctgggtccctgcagcctggggaggcagatggcagctcctaccagctcctctccctgccccacttctgtcccaggggccaggctctacctgtgtggtggtgggtgggctgactgtcaagacgtgtgtcatgtacatttgtatcaaaaataaataagtgaccatg

SEQ ID NO: 3360 - DNA, 428 bp, Bos taurus
  Clone ID: 33-LIB3058-035-Q1-K1-A2
atcgcgagcggccgccctttttttttttttttttttttcaaagttttgaaatgtacttgaattggcttgtttccggtattaccaatccatgcctggtctctagggttctcctcctcccctcgactgggggggttccacacttgggacaggtgcaacaagggggcacagtcaggcaggagtctgccctgtgaggggttcctagccgctgaggccccagccacaagcaggcgcgcatcaggacaccctctctaatgggaaaggccgggccccctgctcctccccaccagtgtgcatcacgtcctcgagagggtgggcgaaagggtgggtgtcagccttcaggtcactgcagcgggggcgcggacagcgaggcatggtcgaacaatgggttccgaacctccatctatcccgttggggccaggcccgggcac

SEQ ID NO: 3361 - DNA, 430 bp, Bos taurus
  Clone ID: 33-LIB3058-037-Q1-K1-A2
ggaccactatgtttttacaagctcatttgttcgtcttttaaagttaactgtggaagtcatcagtccatgagcctgggttcgttcttttgaaccaggttctggggatttaggctgagaggtgttcccttaagaagcagtgactcttgtgaatggttctgcatacttaaaatgcagaaaccctggaatcatgatgtttgaaacaggtggtggagcatggagaggatggttatgtaatttcagctatgtggtaatatgtaatatgagagtaatactgtatgacagagaaaagcccttcctgccatgtgaataaggaaggccccgagggccttggattgagcccgtgatgggggagcagccacagcttggtagcctggatttcgtagcttcctgggcatgttgctacagcctcattactcaggggaagctgctt

SEQ ID NO: 3362 - DNA, 355 bp, Bos taurus
  Clone ID: 33-LIB3058-039-Q1-K1-A2
aaaagggttaacagcacaattttttaaatataaattaagaagtatttataggattaaagtgacttcatttgtatacatttggaatctaaaccagctaaaaaagagtttcctttatgacttagatacgcagtataactgatgctcttctggaataccacatgagacatggtcagaaacagtacttggaaggacattatacagaaaattcagagtagtgctttgaagattttcccccttttgttttattcccgaaggaacatcagtacctgatcttgaagaaatttaagattcaaaaagagaatttttaatttgtaccaatatgagagatcagtagtccgtataagttttcaacaaa

SEQ ID NO: 3363 - DNA, 433 bp, Bos taurus
  Clone ID: 33-LIB3058-040-Q1-K1-A10
cccactcgtccggcggctacagtgcccccgtggagctctggggacctgcaaacttggccgaattagagattgcccctcttcctgctcaggagacctccccttggtgtcattgtggatccaggggtctccacaagtccatggaattcctttcttggcccttgtctcacatgcggacagcagggttctgcagaacacccccagattccattccaggtgggctggagtcgggggtctcctctggcccctacccctgcagaaacctccctggccccctcatttggcctctggctttcacagcctcagtgggctgtgtccacacgtggccaccctgtgtccttgagaactttttggaagcttccgaggggatccccacgtagagacaggtggctagggcccttctcccaggggactgtgagtctgtgtgtaagtgtct

SEQ ID NO: 3364 - DNA, 388 bp, Bos taurus
  Clone ID: 33-LIB3058-040-Q1-K1-A2
ccggctcgacccactcgttcgcagatttgtatattttgaaaaaaaaaattactattcaatcaatggctgtgggaatctgtgacgctgggactctacataggaattgctattcagttgctaagttgtgtttgaccctgcaaacctacagactgcagcacactaggcttccctgtccttcactatctcccggaatttgttcaaaatcatagagtaccactaatcaaataaactcactcttgaatagtctagttcctctcaagcaagaggaattgatactgatcaaacttacagactaaaattaatgggttaaatgatgtgggtaggttgcctcgccccaatatattcaccactcgtggttagacgatagtacctaaaaccatcggtcctt

SEQ ID NO: 3365 - DNA, 318 bp, Bos taurus
  unsure (295): Clone ID: 33-LIB3058-043-Q1-K1-A10
tttgcttcccttcactgtcattaatgtttaaaagaaaagccactgtcttgttgaactaaatagcttaactttagaaataagaaagagcacacttagataaacaggagagcagggctttggagccagctgttgaagagcatccctgctgtcttaagaagctttctccccaccgtgcctatagtttccaaagaaactgaacttcctaactgggttaattttattggaacactgcgattgcgagagaaggtgcagaagatgtcagtggaggagagtgttgtgctaagataatggcctnctgctgctgcctgaatgctgagc

SEQ ID NO: 3366 - DNA, 144 bp, Bos taurus
  Clone ID: 33-LIB3058-043-Q1-K1-A2
gcggcgcagacgtcctggccttcgtgggtgccttctcagccagccaagggtccccgcgcgcctgtagcctactgtcatcctcgggcctgagacaggctcagaatgtgtaaatctctcccaataaagtgtcacacggagaaacaa

SEQ ID NO: 3367 - DNA, 393 bp, Bos taurus
  Clone ID: 33-LIB3058-045-Q1-K1-A2
gtgaagttaaggaaagcttcgtggctgttgatgtgaatgaagaacaagattactatctgctgccagcagggatcatagacgatatttctatgtaaacgaacagtcgggcgagtctcagtgggagttcccagatggtgaggaggaagaggaagaaagccaagcccaagaaagtagagacgagactcttcctaagcagagcttgaaagacaaaactggcactgattcaaattctacagaatcttctgagaattccacaggttctctttgtcaagagtccttttccggccaagtatcttcttcatcactcatgccactcactccgttctggactgtccttcagtcagatgtgcctgtgctgcagcctccgctacctctggaggtgccgcccacttc

SEQ ID NO: 3368 - DNA, 332 bp, Bos taurus
  Clone ID: 33-LIB3058-046-Q1-K1-A2
gcgttttcgtcctccacccattcgctttgttcttcagtgcttgtccatcaggaattcagctcaacccagctgcgccagcaagcgtggcttctccctggcagcccagagtgtccgtagatatcccacaccaccttcctaagcgcaccctgaactcacaccttaccctcctacgtcccagatacccgttttagcacccagcataacctgcacagctgggagaacccaagacagaggtcctgactgcctcccttgcctggctgagtctcaggccgtgcttgggccctgccacatgcacccctcttcacagaggttccagactgatgccctttcct

SEQ ID NO: 3369 - DNA, 441 bp, Bos taurus
  Clone ID: 33-LIB3058-052-Q1-K1-A10
gcggcccaggttctgggtccggagctcagcgcccagctccttaccctcttcgggctccactgttgaccactgtggaggcggtgcaagacttggattgcaaggcaacctggccgtcggactcagcaaggacgggcagggccgctttggtttcatccgggcgctccagcctttgttccgccttaccctcctccaacgacctcctatgtccggcatgttttccagggcccaggtgaggcgggttctgcagcggatgcccgggaagcagcgattcggcgtctacaggttcctgcccttcttttttgtcctcggaggaacaatggagtggatcatgattaaagtgcgcgtgggccaggagaccttttatgacgtctaccgcagaaaagcctcagaaagacagtatcagagaaggctgcaagatgcatcagagactgaactttaaca

SEQ ID NO: 3370 - DNA, 433 bp, Bos taurus
  Clone ID: 33-LIB3058-058-Q1-K1-A2
ggtgaattgatgtctttacccaggtgaatgcaccccagctggtgaacaagccgggtccacagtctctgtttcccagagaatccgagcagcgcgggagccaggctttccctgcttccagaggagggggtgggtgaacgggtggacatgcatgtgagaagcgcctgtgcagtatttattttggtgggtgttgactgcctctgatctcgggggccttccctccagggttcagtttgccagctgggagcggggccctgtggttggtggtcaccagcggagtccccacgtttccccaccttgcagcccagcgccctggccccgctcctgtgtgcggggcctggcacaggctccagggctttgcaagctgcccatccggccatgggcaccgctccaagcttgtgggtggagacccacaactcctggcagcgggaggtgt

SEQ ID NO: 3371 - DNA, 300 bp, Bos taurus
  Clone ID: 34-LIB3058-001-Q1-K1-A6
tgtgaactgctgacgcgggatgcacacgctggagcagtcactgctcaggtgcataccagacgccagggacgactgcaaatcggacactgtgcctgccccaaggtgctctgtgaagttggggcaatgaataaaaccaagtgctttatactggccacggtattttccctcagagatgttactaggcaaacgaatggcacagctgttgactgagcaccgaggtgacgttcatagctatgagctgtcagcattctactgtgatgtggatggaagtcaggagggtgctggcttcagaatcgcatg

SEQ ID NO: 3372 - DNA, 147 bp, Bos taurus
  Clone ID: 34-LIB3058-003-Q1-K1-A10
gtgtgcccatgtagctgctagatgatctctagctcaactagttcctctacctgctcaagcgtgtgcagctgaagaagcgaggcccatggccctgtgtacaccgacgacgtgtgcgactgtttctactacttaaatgccaaccgccta

SEQ ID NO: 3373 - DNA, 459 bp, Bos taurus
  Clone ID: 34-LIB3058-005-Q1-K1-A10
agaaagcagacatacagccaagccttgatacagtaaattcaccagtggaaagaaagtagagcctttttactcatttggaagataggtatttcctacttatgaggatgaaataacaaatgagaatctgcatatttattattcatttattatttaagttacaagcattttatgtacagaagtaaatgcaacagtgagtatatgtgtgtgtgcctgtgtgtataaaaataatcatacagattaacctgctaatggactcaggcaagtcatttaccatctctgggccttttttgcctgtcctctaaaatcagagaattgaacaactttatgaggtatcttccaattatacattccaaccattttgtcagactggcaaattgtattggcttcttcttcaacagtgttgttttgtaggtcattatttcatatacacagacatatgcaagatcagttttttttttc

SEQ ID NO: 3374 - DNA, 366 bp, Bos taurus
  Clone ID: 34-LIB3058-005-Q1-K1-A6
caaaggtcataaagtgtcatttaaaaattctcagcttttgtttatgtggattatttcgttgttcctttagctagttagaaattatggcagaaattttaaacatctaagcatattttcggatagctgtcagcagtgatgtccccacacatcatgtagctccgtgaagactgccttctacacataaggggagaagagcaagggggaaaagcagaacagtgtcttagtataataatgaaataattatgactttataaagacttcactgaaaaacttggggaagggaatccccttatactttgataattgcttctgtacattgctacgaatacttggagcttgtgaagttataattcacagatgatggct

SEQ ID NO: 3375 - DNA, 309 bp, Bos taurus
  Clone ID: 34-LIB3058-006-Q1-K1-A6
caccatctgcggtgatgttggagctctaatcattagcatcccaccatttgagaagaacatatttgtatattccttggtagtgctgaatatacactaaggttattaaaatggtgggatgctaatgatttgggcattcacatcgccggagatggctactgtgcgcttgacaaaaggataaggttagagcgtgaaggggtagacatcgaagtggtggatgatgtgacccaaatcaggcctgacacttcaccttatgaccctgatgtagtctgagattccttaatggtatgatttcacttttgttgggaaggg

SEQ ID NO: 3376 - DNA, 268 bp, Bos taurus
  Clone ID: 34-LIB3058-008-Q1-K1-A6
actgataagaggctgtcctgatcaccatggtgaggagtgatgaacgctatgggcgactatgcaacggtgaatctatgggcggaacgcgatactctagtatttaatgaatgtgtgctgtgagctcattgttatgaacagatctgatgccctagtcgggcttcatataatgctctcgtttctagagtccactcatgtcatattcgattccacctcccatctgaactgtatggctgtgatgaagctgtctcgtgttctaatccactccttc

SEQ ID NO: 3377 - DNA, 159 bp, Bos taurus
  unsure (57),(65): unsure at all n locations; Clone ID: 34-LIB3058-011-Q1-K1-A10
gttgaactttagcttcttatagattaaaaaggtacattgacagtgtatcactggcantgatattntagtgacctagaatattattgatagtgatacactgatagagtaacatattaatcaatataaagataaattcccaccggacgcgttagtcgcccc

SEQ ID NO: 3378 - DNA, 434 bp, Bos taurus
  Clone ID: 34-LIB3058-011-Q1-K1-A6
attctatatgcccactataaatgtttctctgtttgccatttctgataactatcatgactaaattggatagctttattttacaaaggtatggacagtttacagagcagtgtctaaatcttcactagttgcatttgcactaaatgttaatgatatacttttgcaatttattctgtaaataaaatgattaaactaaaaatatttgtattaaagaaaagaaaaagatacattttatcctcagataattgcactggaacttcactagggttaatcctgcccaaccagatttagaaaatgagttagggaatacgaaggatgtttaaaagaaatcaaaatttggagctgtactagccctttagacaacattcagaccctctagaattatttccgtatggctaattccaacatgctgaatatacatgatactctcttttcta

SEQ ID NO: 3379 - DNA, 426 bp, Bos taurus
  Clone ID: 34-LIB3058-012-Q1-K1-A10
gacacaatactatatagttcttgaatgtttgccaacaccgtcagaataaaacagtaaaaaatcccctacaaatatcttacaagaaacctgtttttaattggattgtgttgataaagattactggaatgcatttttagtttttgtatttaattcatttgaattaatcaactcccacacttgacaaggattaacattgtaaagaataaatactgaagtagatttttagtaattcattcacatttaaggccttttaaaatgtaatgatagccttttgcttttcataagcatatctttacccctacattaattacagcattatgtctaagtaacttttaatctaggaaactgaaaaatataagtgctaaagtaaaatatttccttgaaaatactatttaacacatcaatagactatagatagtttctagg

SEQ ID NO: 3380 - DNA, 314 bp, Bos taurus
  Clone ID: 34-LIB3058-014-Q1-K1-A10
gagataattgctggtttggatggtgagggtcatacccccctgtgaggtctgcatagagcaatctgttgggacaactgggcatccaagccgcctggccctgggaaaacccggaatgcttccccaacccaggttccaagccagcaaggctttccaacttaaaacctgggggccctcctgggaattccgcgtttgacttaacggcttagaccgtaggcttaatgggccaagcccggaccctggaactggacaagcctggggtttaaacccatgggcacaggcaagttctgcctgctgggcacagaatgtgacccacc

SEQ ID NO: 3381 - DNA, 392 bp, Bos taurus
  Clone ID: 34-LIB3058-015-Q1-K1-A6
cggacgcgtgggcggacgcgtgggtgttcgaagagtgggaggcccatcggaacctgtcccagctcccaaactttgccttctctgtgccgctggcctatttcctgctgagccaacaggcagacctctccgagcaggagatgagctccgcgagggaggaggcctgtgtccggatccagcaggcgctcaccatgttccccggagtgctcatgcccctgctcgagtactgcagtgtacgccccgacaccaccgtggccacgcaccacttcttcggacccgacgccgaaatcagccagccacccgccctgagccagctggtgagcctgtacctggggaggtcacacttcctctggaaggagccggccaccatgagctggctggaggaaaatgtgcac

SEQ ID NO: 3382 - DNA, 430 bp, Bos taurus
  Clone ID: 34-LIB3058-016-Q1-K1-A10
gttcaaaagcatcaattctttggtgctcggcgtttattgtccaactcacatccgtatgtgactattggaaaaaccataactttgaccatatggacctttgtcggccgtcttaagagggccagtcctaggtgaagatgggggttgacttggggaaagacatggacttgagcccgtggtggggaatctgagggtctgggcgggggaggactagagccctcaggagtgagtttgataagcttggagcagggctcacgggcatgggtggtggagcagccagagctcagacaggtccggggaactggagaaaaggagtcatggagagggagcctttgagagctggaggactcgaatgccgtggatgaatgcagcttgggagacctggggtgagagctaaagccagtgggagaactgtggcacagggtggctgggt

SEQ ID NO: 3383 - DNA, 203 bp, Bos taurus
  Clone ID: 34-LIB3058-016-Q1-K1-A6
ggctggcgaagcactccaggcccggacactactgcacctaggctcagggctcgtgcctcgtctgctgcaaaccaacctgaacgcctggacacggcccgatccctcatcggcccgagcccacccaggcccagcccagccgagcctgtgcgttcacctggcgcagcctctgccgcaggcggcactccatccccaacccgggcccc

SEQ ID NO: 3384 - DNA, 359 bp, Bos taurus
  Clone ID: 34-LIB3058-017-Q1-K1-A6
cagacgcgtggggtttgggatgagaacagttctgacggccggtatgtgaaggagaactgcacacctctgaaggtcagtttctggcttcccccagctcaactcatgccaaggagaccccaggccttgggcaaatacacagcagatgccatgcagctaacagtggcctgctcgccccaactctgtgggagcctgtgcccaaggctgacagatgctggcagtgaggcttcttgcaaactggcctataggggcccttagatcttcccctttcgcacaaggtggctctgatgtactcatagggcatacgaagagccagatatctgagaccctgctactttccgctacctcttttctgactaggc

SEQ ID NO: 3385 - DNA, 467 bp, Bos taurus
  unsure (434),(439): unsure at all n locations; Clone ID: 34-LIB3058-019-Q1-K1-A6
aaatgatctgcaggagttatagctgaaattcacaaaagacagaacaataaatttggaaataactgttagtttccttagctgccattctctctgtatatgtctctctctttctgagattgcatgagtttcttttctctgccagtctttgttcatctgtttcattcttctttttatagactgcatttttctgttgtacttctctgtggcctgaatatgatcttcacagcccttactttataaacttttggcttagaaatataccacctgcatttgccatctcatctcagagatgagaaagggagcataaataagacttcagtttgtttagcacagccatggcattggcacctcgagtctaatcagctatgctccgcaacttatttctctgacagttagggcatgtgggcagtgtgagtacccatttaagaaagcanagaanataagtaccattagaatataatatatct

SEQ ID NO: 3386 - DNA, 395 bp, Bos taurus
  Clone ID: 34-LIB3058-020-Q1-K1-A10
attggtttttgtaaatcgatgtttcttaatacttgtatcagttttgatacacgagtggtctaaaatgctgtggtgcaattactagtggccgctgcacgattgccgtccacgcggcggggacttgatttcacaagggaactttcctgcctcctgtcacctgtacccctgttcaatgaaatgtcattttaatttatctttctaaaaaatctgactcttactgtgtgcccatcatgaaggcctttttcgaaagaaaaacttcatgaatcaaaattacttgttctgccttcaagtactgcatacaagatgtctcaagtagaagaagaagaacaaactggaaactttaccaaaccaaagcttgctatttttgaaatatcatgtgttcattccagcaaggc

SEQ ID NO: 3387 - DNA, 404 bp, Bos taurus
  Clone ID: 34-LIB3058-021-Q1-K1-A6
tgacaaagctatttgtaaacagagagatttaatgtttaaatgtaaaagcaaatgcatatgatatgtgggtgtgcagatgaatgtgagttgtcaatctaggtagacatagccatactgactacaggcaaccgcaatacgagactaaaaaatgcgctaagatatcaggatctacatatgagtgctcgctaagatggaacaggacaggcttaatgaggcccctggttacagatgatatatgctcaccacaatattaggtactacagtctgagaacatagccctattggcaggttactattaggaagtataacaggtactagcacatgatcgcaagacctataacccgaatatctaatataaaagacacacatgtactggtacacacatgacatcgtaaataatactg

SEQ ID NO: 3388 - DNA, 388 bp, Bos taurus
  Clone ID: 34-LIB3058-024-Q1-K1-A10
ctagatcgcgagcggccgcccttttttttttttttttagcatggtcacatttagagcggtttcgaacaggtgagctgtgatgtttgcctatgcagttaagctaatagttctaaatggaaaatctgtctcataagctgacaaatgctgacattataactgtaaaaagaactgagaatcagacttctgcattcagtgggattctcccgacagaaccacactttgctgggtctctgggatttggggcaggggagcagggggctcagggcaggtcacagctctgccctggagatggccatacccaagcacctgcaccttctgttctgtctgtaaaatgaaggttatgatggatgtgtctgatgtgcattgaaggtcattcttgatctgtctg

SEQ ID NO: 3389 - DNA, 437 bp, Bos taurus
  Clone ID: 34-LIB3058-025-Q1-K1-A6
ggcaaagctcgcgagaagagaactgtgctcagagttctattgaatccagctcaaaggcactgaacatgctacttcatcgttcatagctgacgctaaatggcctacatgggaaagacctcctactatgctgaaaaactgctaaacattgtgaagggaacccgcgaaaggtgaatggcctgctactggacagtgaagactggagcccactctgacagctgcatactattccttatacagatacctaagcacttgcgtcatcttgagcacaagcttgactagcttacgagcgatctcagaagggcatctcaacgtacgcaaagcacactgactatccatcggaatagactctcagtaccattacagcgggctaagcaaggatattaagagaagggacaggctccaatgccctattaccaatgcggcacattgagggtcac

SEQ ID NO: 3390 - DNA, 414 bp, Bos taurus
  unsure (368): Clone ID: 34-LIB3058-028-Q1-K1-A10
gtccttttgtgtgaacacagccgcagcctggcacgtgacccactgggccccagggtcgtggtgtcagtcttgggaaagtccatggcggcccctggagagtgcctcctggagcccagcgctctgccactgtccgtcctgtgtccagggcagtgggctgcctggggcacccctccctggacgcacggccggcccacagcacaggtagctgcgagaaggccagcactgccacgcgcactggtccctgctggacctggaggccctgcccaccagagagggactcaggctagcgctggacacgctggatcggcagtggcttccgtgggcagcttcattctaagcccctgacatctcactgtagaaacacctgngaagtgagagatggaacacaggagtccggaagcacttggaggacag

SEQ ID NO: 3391 - DNA, 447 bp, Bos taurus
  Clone ID: 34-LIB3058-029-Q1-K1-A6
gagaactctagtagtcttggtagtaagaaccattgacagtctcacagcagaggcaacggagatgactgtagagcctctggcatgagaatatattcagaccccacacttgatcagatccactttgtgttcacactgttaaatgcttctgaaggtactgtagcattttgattgagaaattggttgttgaaatcttgttctgaggcggtggttcggctgtacattgcagtcacctgtaggactgcttcctgaatgattccaggatgtatgtagctaaacttgagacccggttctccacctgtacaaagatcatgagtgttcttatagtcactggaaaggacaaaacaagtaaaaacttgtgaattctaaaagtaactgaactgcaaccaagttaacatatattgtctttttaaaaaagtactcctccagattatagcacttgctcctttt

SEQ ID NO: 3392 - DNA, 119 bp, Bos taurus
  Clone ID: 34-LIB3058-031-Q1-K1-A6
gcggcgggaggcggcgggatgggtggcgccagcgccgggcggctctcaatgctggttggtcccctcaggcgcttgggcccgctcgctgctccaagattacgcctaggcctgctaggact

SEQ ID NO: 3393 - DNA, 276 bp, Bos taurus
  Clone ID: 34-LIB3058-032-Q1-K1-A10
ggaacgtggaggataccttcagctggctgcggaaggaccactctgcctccaaggaggactacatggaccgcctggaacacctccggaggcagtgtggcccccacgtctcggctgcagccaaggactccgtggaaggcatctgcagcaagatctaccacatctccctggagtacgtcaaacggatccgagagaagcaccttgccatcctcaaggaaaacaacatcccataggaggtggaggcgcctgaggtggagccccgcctggtgtactgctacc

SEQ ID NO: 3394 - DNA, 324 bp, Bos taurus
  Clone ID: 34-LIB3058-032-Q1-K1-A6
gggtgagcctcttcaccagctctccaccttctcctccctttctcccctatgggggaatctttggggactcactggcactggctggggagaaacagaagcccaggctttgggcccctagctgacccctgggagatcctccccttggggtagtgtggtcctctcacatgctcacacccaatcatcttggacctctgtctcgggccggggtctggcaggactgccattatctgatcagcaggagaactgtcctgagggtttttaatcatgtttggatgttaagtgttagctcctatagtagatgcctggggccaggtctgaactgtg

SEQ ID NO: 3395 - DNA, 437 bp, Bos taurus
  Clone ID: 34-LIB3058-034-Q1-K1-A6
gccggacgtgccgccgtgcctgcctttcgtgtgctctccctgacgaggcggtaaggggaggcgtgctgaaggaaggtagagagcagatgcgagcttcgagcggagtactggtaccaggcgtcctaagctgaagggactgaaccgacgtcacaaccgttagggacgaggaccagtgcggagcagagtccggccgaccccggaacgcgctcaccagacggtagtccagacacggaccacagcgatccgtgcatagctccagcgaacgctcggttcagcccgagcgattacactacgtggttttcaatatcggagcggtatatgtccatgaactacgatgcgaagtcgatgactatgtcgaacagacataatttaatgtcgcagtcgtctttgcgctttaacatttcaaacatcttctgttattaaatgtcattttaatg

SEQ ID NO: 3396 - DNA, 427 bp, Bos taurus
  Clone ID: 34-LIB3058-037-Q1-K1-A6
cggacgcgtgggcgcgagcggtcgcctattttttttttttttttttttttttgttttgtttttgggaaaataactttatcgggttcaggggcaacaggcaaatgtccaacatggaaggtgggcctactggataggataagaaatgggacacaggacagacggtgaccagttcattcgaacacgggttttacttttcacgtgcaaagatagcttagaggaccctctactggatgaacggagacggacatgctgaaacaagctgtggcagagcttcatgcctgcgctttgggggccggccaagccgtttgcctccttctgtctgggggttctggtttccctgctcttgtggaaagatacttcccacagaacatgcttttaaagaaaagaaacactttattttttattttatttttttttaaatttcaca

SEQ ID NO: 3397 - DNA, 166 bp, Bos taurus
  Clone ID: 34-LIB3058-040-Q1-K1-A6
gcggtgttctcattttcccttggttaactaacatcaatgctgactgcctccctgacgctgttaattaggcacctgggacgggagggaaagtaaggccttgctggtgagctgccttgtgcgtggtggtaactttttgttttttacaaaaataaagaccgaagaactt

SEQ ID NO: 3398 - DNA, 428 bp, Bos taurus
  Clone ID: 34-LIB3058-042-Q1-K1-A6
gtttggaattatatcatgatcaatctatttagaaaagcagatatctttgaaaacttaaacattgctatattgattctctatcaaacttataccttacctttattaataactgtgtaggggtctgagtagaagaaattgtctcgtgtggggtgcgatggggacacacagtggacacggaaagtcagtggagcagacactgctctggcaccaagattgcaatgacctcatgttttatgtggtttataaaggcttgaaagattgcatgactttaaaacaattcttcatttgtagaacctgcttctcagatattttttgccactttaaacactttgagtataacagcagaggaagaacaaccgccgatctgggagtctgttcctgtcagcactgctggttggtcattttggtgccaggtggacaggctgttt

SEQ ID NO: 3399 - DNA, 304 bp, Bos taurus
  Clone ID: 34-LIB3058-044-Q1-K1-A6
ggaatgcacagattctgttttactagcattactatttagttcataggcaacgggatttgagctcccttcgagtctacattagtgacagttcatactgctccaatcatgcatatgctctacagatcttcactcaggagctggcattggtcgctaactctcacgcacttccatgcgcacatactgcacaacaccagatcttaagactcatgggtcatggtgactccatcatgcttacagtggccccaaacacgctcttgctgagagcttctgaatttgcctggcacaatgacattgtggacaccct

SEQ ID NO: 3400 - DNA, 324 bp, Bos taurus
  Clone ID: 34-LIB3058-046-Q1-K1-A10
ccagaagtgaagattacagggcaaaggtgaagtcactcagatgcaagcaaattcaatgtatatttggagaggtgggaggtatcatcagtatatgtgcaaagtagtccctaactttacaatcagaaaagtgactttcagggccctaagaaagtattccctccaacactcacccccatgggcagtaagccacctcccctataagtatttagtctcacttgggtgttgttcagtagtattattgatgaaatacgtggttgggaatatacagactacatggagattcagggattaaactttaggtaataaattgtattttgcatattg

SEQ ID NO: 3401 - DNA, 415 bp, Bos taurus
  unsure (393): Clone ID: 34-LIB3058-047-Q1-K1-A10
cggacgcgtgggtttttaaagactaaattaaagcaaaatatagaattccagcatattggggtagataatctagttgggaataattttaagtctcaccttcccctttaaactagtatttgtaattgactcatgtttaaaatacttttaatttacaaattaaattacaaatgggagcgttagatttagtttagacttaggggggtagcagtaccagtaaacttttcaactacttaactttttgcaaccacaaaacctgtaatacgctgtacagtaacaagtgttggcattatcagttgaactgtaaatataaaatgcttcttccaattagtctctatgatgattaagtttctaaaatttatcagaacaccattcagaaacttgttttggggaatntgatagttattgatgtacatct

SEQ ID NO: 3402 - DNA, 354 bp, Bos taurus
  Clone ID: 34-LIB3058-047-Q1-K1-A6
cttaagcggaatcaaatatatttatttttgtactgaaaccagcttctctgccatgtcgaggtggttcggcccgtggccactcgctgcccccagcctggctggacagcagggagcccacagcccccagtgggccccttcctcagccccgggctcagaagccccttcttgccggccccctccatctccagcgcaccagtccctccttgtctccggtgatgaggaggccttctagactggcttctctttctcccagctcagcttctctgaggtgctgtacacctgcattagccctggtttcctcctctacccctcactgtggtaccgaggtgacgctgacccggatgggaaggggtg

SEQ ID NO: 3403 - DNA, 238 bp, Bos taurus
  Clone ID: 34-LIB3058-049-Q1-K1-A6
gagggaattgtcatctccatttgctggttaaagagttgaagatgaagcttgtaaagttgatagttgggagggcaaacttctaagaagagtggggtcaagcatcgaatgtgggtcttctgactgtttaattcacatttctttccatttctcactgctagtgtaatactagccagaggcaagaagccccaagatttggggaacaaaaagaatggtggacttttttttttttttttcctac

SEQ ID NO: 3404 - DNA, 444 bp, Bos taurus
  Clone ID: 34-LIB3058-050-Q1-K1-A10
gctgagaggagcgtagagccacacgtgggttctgtgtgcctcactctccagtgcagtaactgtcgcgtggcctgctgtttctgttgtcctgtgtgcctgtgtatgcatgccgtttggttcctttctttgaatgcagcctgcatcttaggattttttattagtttggtttttttttttgttttatatcacagttattttgcatggattgattgtcttagttttataatgaaactgagagaaatgagatttcttttttcaatgaatagattttgaattgattctttagaccaaaaacagattttttttttctttcagttctaatggtgaaataaaatgttccatgaaatcaaggagtactaactgctcactggttgctctttagcattactagtctctgtcagccatgcctaagtcactttaattacccttactgattctgggaat

SEQ ID NO: 3405 - DNA, 454 bp, Bos taurus
  Clone ID: 34-LIB3058-051-Q1-K1-A6
gcctccgtgcctagcatcttgttgcctaggctgacttttaatcctggcttccttctttgtcattagccctctgcctgggctcctctgtccccctgcgccctttggtctccatctgacctccttaatcagtccctgtactagctcacagtcagaggcccagttggcttcaagtgtggaagattcaagttcttttgtaataagacattagtctgccaaatggtccggagatgcaaagagattcccagggagggtaggagctgtctagatgccagaggcggccaatgtgctgggtcagaagctggagaaaagtctgaggaaggcgctccctcccacccccaggcccctgtctccagcctcacacagggatctgtgggtgtcacccctcctgggtgacagcaaatactctcaggaaaccatctaagtccaacccctctatgctatgctatgctatgct

SEQ ID NO: 3406 - DNA, 83 bp, Bos taurus
  Clone ID: 35-LIB3058-003-Q1-K1-A4
gtagaatccaagcatacttagtctgattttattacaagctttttctgtgcatacgccaagggcactgtaaacatcatgataca

SEQ ID NO: 3407 - DNA, 356 bp, Bos taurus
  Clone ID: 35-LIB3058-004-Q1-K1-A12
gttctagatcgcgagcggccgcccttttttttttttttttttttttttgtttcctccaaatttgctttatgtaattggatataaattaatgaacaaaaacttaagcaagatacatgtaacaatttaacagaacctgataatctataatttctttcaatttttctcaaactgattatggggctcataagaaaattaaccaacatggatactgctacagttgaatgtcaaatctctaaatgcttataacatacttaatacttctataatacacttatgaagaacccttcaagagacttgactcgtgtttagcatgcacaaaagtgttaaagaatcaaatctttaacttggtacaaaat

SEQ ID NO: 3408 - DNA, 190 bp, Bos taurus
  Clone ID: 35-LIB3058-005-Q1-K1-A4
cggacgcgtgggtcgcgagcggccgccctttttttttttttttttttttgtttcttatgctctcatcattgaggcgatgtagtaatagacattatagtagacccatgcgaaatatttagaattagaaggggattaaagagccacgtagggacattacgttgactattgctgatttttatacgaaaggggg

SEQ ID NO: 3409 - DNA, 297 bp, Bos taurus
  Clone ID: 35-LIB3058-006-Q1-K1-A4
gccctcctcttcataggacagttcatgaagacactggtgattgagaagctcttctgaggctaagttccgaaagcatggggagggggaggctagcactccactcagccttaaacgatgttgaggtggccagtcaggactcctcaaagcagcgtttgctgcataggcctctgttatgttttctgagagggtgtccttccagtctgtctacataccttggtctgatgccaattcatcctatttacacttgatctcgtattgcctattgacacctatatggatcttggaatgaactttttc

SEQ ID NO: 3410 - DNA, 228 bp, Bos taurus
  Clone ID: 35-LIB3058-007-Q1-K1-A12
acgagtcaacagtctaaaccgactcggtcggactgtatgcagcacttatagaagactatccttacggaaactctttgacagattatgatgaatccatcaacgtgtcctctatttaatgtgcagtatggggctgcccatgtctggatttcggatatgctcttgatatacctgttactctgggtgatgacatgcctaacctatcagatctatcatacaaactggcattaa

SEQ ID NO: 3411 - DNA, 218 bp, Bos taurus
  Clone ID: 35-LIB3058-007-Q1-K1-A4
tcccggtccacccacgcgtacgcaaacacgaacgcatactgctctagcacacgagcagacttccttgtttcctcaaaaaagctaaagggaccacttaacatacaatacagatatacaaaaaaagggcgtacttcattctttacaacttcctacattgcttctcatactttcatatcatctacaactttcaattctcccattacacccattattatttt

SEQ ID NO: 3412 - DNA, 409 bp, Bos taurus
  unsure (271),(381): unsure at all n locations; Clone ID: 35-LIB3058-008-Q1-K1-A4
gtttttactgagaagtgtctgtcctgtacacagaggggaggagtctgaaatgtcagctacgacccctcagcagtgatccttgggcggaacgcgtcactttattatttaaggaatgtgtgtgtagagtcgctgtttatgaacagtactgtgtgtggggttgggttttagtttgttcccgcttttttgagtcctctcatttcagcctccctcccacctccctcccggcctggctggctctgctgatgctgccgcgtgtgcggagccgggcctncgtggctcaggacccaggaccatgtggactgtggttcccacagccatgacctggggtgcaagggggctttgccacccctcacttcagagcagaccgggcacgccgtgcangtgggccaggtgaccccccctgcgtgag

SEQ ID NO: 3413 - DNA, 425 bp, Bos taurus
  unsure (369),(417): unsure at all n locations; Clone ID: 35-LIB3058-009-Q1-K1-A12
aattttaggggcattcttttactggagaagcaaaaataaagaggaggaggaagaagaaattcctaatgaaataagagaggatgatcttccacccaaatgttcttcttctgccaaagcatttcacatggagatatcctcctcggagaacaacacactgacctcttccaatacctacaacagccgctactggagcagcaaccccaaagcacacagaaacacggagtcgtttggccacttcggtgacttgcgccagtccttttcccttcactcgggcaacgccagcgtaccagccatctatgccatggcagccatcttgccccaagcccgcataagaccttgtagtgacaggccacagagggtcatcaccgncggctgtgtccaggagcaacggttccgtcagcaggaaagcccggcctncgcctgta

SEQ ID NO: 3414 - DNA, 121 bp, Bos taurus
  Clone ID: 35-LIB3058-009-Q1-K1-A4
tcagatcgcgagcggccgccctatatttcttcttttattttgttttgtatattaactggatgggttttttttttttttttgatagtataagattaggtccaaaatatttatttcatttgta

SEQ ID NO: 3415 - DNA, 246 bp, Bos taurus
  Clone ID: 35-LIB3058-010-Q1-K1-A12
gttcggaattcccgtgtcggcgtaggcgtacgctttgccaatatggctagctcatagtgagtgtcagatctgtgaacctacctttaagatggctgatcgtgttttccaaattatgcttagactggtgatctgaatcattgttacgctaagtcacacctatgtggtcccctttatcatgattgaaaatgtgtcaattttagagggacctatacttataattctacacgtactggataattctgagca

SEQ ID NO: 3416 - DNA, 105 bp, Bos taurus
  Clone ID: 35-LIB3058-012-Q1-K1-A4
gtttgctcatcaccatgctcataatctgttttgtatgaatggttttcaacattcagagaataatcggttctaatattaaatgcagtatatgctattgatagtttt

SEQ ID NO: 3417 - DNA, 420 bp, Bos taurus
  Clone ID: 35-LIB3058-013-Q1-K1-A4
caccaatagctactgtgtgtgcagttatagatggaaagaaaaaaagcactagtgtgctaccaaaaacaaacaaaaaaaaaacacagagggaagaaattcgtggagaacccaatgaacagtataaaatttcagagaatgctagttcagatgaagttaacaagatccatcaaacaatagagggctatttctgccagtgctgtaagtggtactggggcgcttgactgagctgagttgaaaaatgaaatgagaatgattcgtatttctggaaaaaaaaaaaaaaagtcaaggaaataatacaggcagattcagacaaataatcaattgatcaagtgggtggtaatgagttactgattaggattgaaatacattttgttaagagtttccccaatagttcagtggtaaagaatctgtctgcaatgc

SEQ ID NO: 3418 - DNA, 261 bp, Bos taurus
  Clone ID: 35-LIB3058-014-Q1-K1-A4
gctcaggatcaggtggcctagaagtgatctggcagggacctgtgtggctgcacaggagaggcctgacgatcgcaaggggccatgaggaggatctgcgctgcttaatcaatgactgcttctgtgcactgctgattgataatggacatcctatgctaatactactgcagcttaactgaaagtgaaaggcctacaacgcaaatgtatttatatctcaagtcaagatatatactaaaatacctatagcctacaatagaccaaaga

SEQ ID NO: 3419 - DNA, 321 bp, Bos taurus
  unsure (37),(244): unsure at all n locations; Clone ID: 35-LIB3058-015-Q1-K1-A12
ccgcgcaggcgcagacgggccggcccgctaaggcggngccgcggcgggagccgccccgcgggtgaaggtgggccgaccggacgggactgggccccacagcagcgacccctcggggagcagctgtgagccggtcacgcggagggatgacctatctaggcggtgacgccgtgtgagcggaagagatctgtcagcatgcaaacggtagggcactctgaacacaccctgaagacggccctcatctcanagaacccagagcttgtgaagcagtatgagcagttggaccccggggagcagcgcctgctgaacgaggccttccggccc

SEQ ID NO: 3420 - DNA, 456 bp, Bos taurus
  Clone ID: 35-LIB3058-017-Q1-K1-A4
gcattttacaactgctgcagtctgtgcctgcctcaagataatcatagttagttatgtgtcacctgttccatttgagttataaatattaaatgtaattaccctttaaaatatttgcaaacagattatactaggattcagcatcaaaggtctcaaatatacagaaaggcatggaaagagacaacattgcatataactttaaaaaatatgtacatataagagtttgtcactaaatataaagtacactttttaagtgaaaagaaagaaatgtgtcacagtttaactggaatcactctttttcttagtggcacataagataatgatgtattttccaatcaaagatttcttccatttgatgaaatatgatagttcccgtttagagagaacacaggtatggacctttaaacacttggaaatttcttaaacttagtagcacactgagaaaccctgaaaccaggt

SEQ ID NO: 3421 - DNA, 345 bp, Bos taurus
  Clone ID: 35-LIB3058-019-Q1-K1-A12
cggacgcgtgggttgaggaggaggccgaggaggaggtggcctagggcgcctccatcagttcacttccgcaccctactaggaggctaacctttgaccaccaagaatccctgcttcacctcccagcctgactcacctctgaccctacaaccttgcacctcttccctgggccaaccgttgacctttgagccccactttatccccgcccttgagctccccacgttgaacacaccccccctaatgagccctgcttttaacttccaacccaacaggtccaacctttaattccgggatccttctttaaccctggacctttccactttgaacctcccttaaagcccttcaacc

SEQ ID NO: 3422 - DNA, 464 bp, Bos taurus
  unsure (24),(287),(448): unsure at all n locations; Clone ID: 35-LIB3058-021-Q1-K1-A4
cggacgcgtgggctgccttacctncccctcagcccctgccccctgccaggagagagaccaccttccctggcaccatagctcctggcctgaggctagccgcacaggggcccaaggcctgccaactgtggtgggggagagtctccctggggtgctgtcctggtgcctgggggctgggcacgtgaacacaacctcaccccccttcacccccaccttcccgatcaagtctccaggaacagggaagccagcagcacacctcaggcgagagccctttacccaccagtgctggngtgaccagcacccaagagcccagttttctaggggtggtgtggtaggaaggtttagaaggaagtgatacattactgccagggagtctggttggctccttgaagctgtgtctttgaggagctgctcaaataaggctgcttgagccccaaaggtgtcctgcggnggtgtcagagtctggt

SEQ ID NO: 3423 - DNA, 327 bp, Bos taurus
  Clone ID: 35-LIB3058-022-Q1-K1-A4
tcgctagaaatctatcgtgacaggtaaaggcggtgcaggcttcattcatctcaaagatcagtgtttgactgaacaggatctttcgtactgagtcggcttttaaatctttcattgacacttagctctcatgcatgactaatgctagtcttacacattgctgtgagatctaactccagtcctgatgggcctaacttgagcactttcgcatcaatggagcatgtaacaccacaagaaagctctgccttacctatgccaatactctgaatcattgacactatcattactgatattgaatccagaccattcacacgtgcggttaacgcatat

SEQ ID NO: 3424 - DNA, 433 bp, Bos taurus
  Clone ID: 35-LIB3058-024-Q1-K1-A4
tcggtcctggattgttttatgagaagtaaggggccatcttgtgtttacatgcagtgacgtgtgtgtttatatccttatgtacagtggtaaaactggaacaacttattagcgtgtgtattactctacctaccaccctaaacatagttggaacaagtagaaaggagcacagtttcctaatgaaagcatattagcttctcaagctttttctttttatggaaaaaaaagaaagaaacagatagaactatctttttatttcctgaaaacgtggggccacattttttctttaaaaagaaaatcaagcttaaataactgatcagaaattgttttgaagtccaaatgaggctgccttttactgaaagcagaccatcacattttcaccagggcacacttaagttacttcttggtcatttgtgcatagtggtctattttaact

SEQ ID NO: 3425 - DNA, 385 bp, Bos taurus
  Clone ID: 35-LIB3058-025-Q1-K1-A4
tcgggcaaagcttgcgatatacagacattgatttgcgctcgattgaatgcagcttaaagaggcagaacgtgcgacgtgaatccgcattattgcagtctctatgcttactgggaacgcctctacaatgctgaaaactgctaaacatggtgaagggaaaccgcgaaaggggaattgtcagctacaggacagtgaagactgaagcccactctgacagccgcatactattccttagacagataccaaagcgacttgcatcatcatgagcacaagcttgactagcttgcgagcgatctcagaagggcttctcaacgtacgcaaagctaactgactatccatgggaatagactctcagtaccactacagcgggctaagcaaggatattaag

SEQ ID NO: 3426 - DNA, 161 bp, Bos taurus
  Clone ID: 35-LIB3058-030-Q1-K1-A4
gagcttatggaccgacgtagactctgtcccagccagctttcatccgatgctttcactggtctgggttgtcttcaaggcaccacttgcaccacccgacacgagattagtgaatgcgcttatacgacagcgcaaatgcattgagaatatcctcaggtgtaccc

SEQ ID NO: 3427 - DNA, 352 bp, Bos taurus
  Clone ID: 35-LIB3058-032-Q1-K1-A4
gaaccatgtaaaattgccgatattcaaccattgccgatctacaaaaatgacagtatcatatgcatcaacctaacactcactgctcgatgcaggttaaaatccctgtgaggcaaggggagaagattctttaggaactcagttttgaatgtttttctcttaactcatgtggatctaaaatttaaaaataggaatgaatgtcttaataactacagcttgttgagagtgtgaaacattttgagcacaaaatatgcagcacataacttttcacatgaagtgtgttgcatagaaaaggttaaaatacattctctgagttgctgtggtgttcatttcttgtaaaggtcttccttcattt

SEQ ID NO: 3428 - DNA, 428 bp, Bos taurus
  Clone ID: 35-LIB3058-035-Q1-K1-A12
cggacgcgtggggtaaaatctgggccagtactttcttgtagttaattgcatattagcagagcagcatgggaaatacgatatttattggatagggatttcagctactaaacactctctgttgtgagagaatctttttattcctgaataatggaagaacagtactttggtgctgacatcaatgaggcacttttcttagtcctagtggaggatgcagggtgctgttagaccaatatcacatctcgagtcttgatcaaattttcattctctgtcaatttgaaaaagccggaaatgacagaatatggtatagccaaggcacacatatttgcagtttaatgaaaagtagatttcttatattacttttttcccctttccagtgaagagccctttgctatatttctaccatcactaatagttgaaagtgtttcatt

SEQ ID NO: 3429 - DNA, 402 bp, Bos taurus
  Clone ID: 35-LIB3058-036-Q1-K1-A12
ctggtcgctgtgggtctgggcgggccatgagccatataggcgactactgttcctccccggagccattccatgtggcgagggagggggtttcacacttgggactctctccgtcggccttctcacttcataggctcatcataagcgatccataccctctaccatcttcctgagtccttgctgcagctggccacccagctctgagtggggacagggactgaactgctgacacaccatgcacacctagaaaacatctggagcctagaaactactcagacttcggactgactgaccgcttgcagccctcccacataggatgtgtcactaacgcaccttacatgtcagagcattgccagtgctagatgtgtatactggacatctgcacatcatacgtagatagacctc

SEQ ID NO: 3430 - DNA, 428 bp, Bos taurus
  unsure (39): Clone ID: 35-LIB3058-039-Q1-K1-A4
gacttaagtatctaaattacgaaaggattacgcatactntattgcttcttaactgactagaaagagccaccagcatcactctgtgcctttggactcagtttgtgcgtctgtaggacatgtgtgtgctccattcacacggtatttacaatactgtaatgaatctgaattacacatcctacagtcagtagataatagtgtaaccttcaacatttcagtgctctcatgagtgttctttaagtgctatgtaaatctccccattacttatatggatataacggacttacctgaggaaggagagcacgcatcgcatggggagtggtaaccaaggtgaattttacaaactggtgtgtagtagatttaaatactcaaactaaatttaagtaagaaaagctaataatagtgactttttttttcccaaatggggaaaa

SEQ ID NO: 3431 - DNA, 322 bp, Bos taurus
  Clone ID: 35-LIB3058-042-Q1-K1-A4
aaataaagtaatacacttttaatactcatgaatagtgcatactttccttgagacccgtggcgcatctctcattgttgggtgtggccaccaatggaggtcactcaatcacaacctgctcaatgacgcaacgtgttagacctgcagtctggatgaaaatgccggattaccctgatagcaccatcacgctgctgtttagggagtgctaactgtgcatatttcggatgcgggaacactggtggctattctttcatatgctgacttggtgggcactctggccactttgggcacatgttggcctatgacatacgcctggctttcttcc

SEQ ID NO: 3432 - DNA, 394 bp, Bos taurus
  Clone ID: 35-LIB3058-045-Q1-K1-A12
gccacttgtgcggtgtcgtcaggttccttcgggtcccggcttaaccagtgctcagcggattcgtagagaggagaggtgtactctgcagtccctgatgaaccaagggaaccctccgccgtatccgggccccggtccgacggccccgtatcccccttatccatcgcaaccgatggggcctgggttctaccctccaggacctccagggggaccctacccacctcctcagggtgggtacccctaccaaggatacccacagtacggctggcagggcggacctcaggagcctcctaaaaccacagaacaaacagcctggccctactgactagtgagcacggctggatctccaccgcgtacacccagactggcagcttccagccctgcatcgagtcccatc

SEQ ID NO: 3433 - DNA, 440 bp, Bos taurus
  unsure (424): Clone ID: 35-LIB3058-045-Q1-K1-A4
cagcgatggggaaggcaagaggagatgtggcttacttccagaggagtagtctattctgggttactatcatcattctctcttttggctattacacgtgggtgatcttctggcctgagagtattccttatcagagcctgggacccctgggccccttcactcagtacttgctgaagcatcatcacaccctcgtgcatgcttggtattggcttgcctggatgattcacgtgggagagtccttgtatgccattgtattgtgcaagtctaaaggcatcacgaatacttggacccaactgctctggttcctacagacgttcctttttgggttggcatctctctattacttgattgcttttagaccaaaacaccaaatacaaacttaaagaagatatccaaaaaaaacttgtcactttattgtacacttganactaatataatatttt

SEQ ID NO: 3434 - DNA, 409 bp, Bos taurus
  Clone ID: 35-LIB3058-051-Q1-K1-A12
aaaaaacttcaagttgaaggaaattttgtaaggaggtcccagtgaacaccatctactcttcaccttgaaatttcaaaaacatgcaaaatataggaaaaccactaacatctgcttccttctccacccacaccccctccccacgcacttcacagaccagtttgagtcgtcaggacacgccacctctgggctcgtccctggtccccaggtcagggccgttccccgccacatacctggatggcgagccagcctcccctgcaacctcagggcggccccgcgtctccgtctgcccgttgtggccgttgctttgcttttctggaccgaagtcctactgggaccgcacacccagtcacccccgtcttgtgtcacgctgaagacacaagtcactttgggggcattctgttcttcccct

SEQ ID NO: 3435 - DNA, 191 bp, Bos taurus
  Clone ID: 35-LIB3058-053-Q1-K1-A4
gatatcaaaggcgcctcctgtgctactatatagtaggcatgtcaagagtcaaggagccgtgctgtagatgcctgtctctattgataggactttcgcgtgctaatcaaaagccacgacttaatgtatgagatatgagaggagagataataaagggaattcaactacgttaaataataggtctgttttacctt

SEQ ID NO: 3436 - DNA, 377 bp, Bos taurus
  unsure (333): Clone ID: 35-LIB3058-054-Q1-K1-A4
gcctgggtggcatccggagctacaacttcgagcagatcatgctgagtgccgcagtgcaccggaccagccgggacgtcagcatcatgaaggagaagctcatcttctcagagatcagcgatggcatggaggtctccgatgagctctctgtgtgttcggacaacagttatgactcgtatgccaacagcgccaccaccccggtggccccgcgagggagcggcagccgtgccaagaccctcacagaccggagtgggcgttagctgaagacccgtctgtccagctgtacctcgtgtggagaccagagaagcccacagagctggcagaagcatgctcggngcgctaagtccacaggctcctcgttggctccggtcccttgtcag

SEQ ID NO: 3437 - DNA, 269 bp, Bos taurus
  Clone ID: 35-LIB3058-056-Q1-K1-A4
ctttccattccctgggctcctgaagaagcagaaactatgttccattatatgctctatggactgtgtggtgtcttacgtttactgtgaccgcctttcagccaatcaaggtggaactttgcttccatgaaaaactgggatcaatccttccttgctagccaagtactgataatgtgcattgtgatcacgtggactttgctgcactcgggttggtcttctgatttcatattccatggatgtacagctggatgacatgctgaattccaagtgag

SEQ ID NO: 3438 - DNA, 353 bp, Bos taurus
  Clone ID: 35-LIB3058-057-Q1-K1-A12
cgacgccacgcgtcacgtatgatttgagtgagtgcttttccttgctttgttaaccatcactacaatagtctgcagcacaacttttcttttaacaaagctagaacagttttggcttcttaaacttcttatttgggtaggttaagctgccatacgtgttcagtgtgaatagtgtttaagttgaaaatattgtaaaaaaattatattttttcaaaaatatttaaaaaaataactaataggtgaaactgaaaaaataaaaggcactggatagaggattggcacgagaaaaacatgggacaattcactggcttttggtgaccactggccactttaaaaaaaaaaaggggggccccttt

SEQ ID NO: 3439 - DNA, 456 bp, Bos taurus
  unsure (26),(35),(41)...(42): unsure at all n locations; Clone ID: 35-LIB3058-057-Q1-K1-A4
cggacgcgtgggtcgcgagcggccgnccttttttntgtttnnttttttttttttttttggggttttttttgggcacaacccaaaatttttagggagagtgatccgtgaaaaaaatggggcttcacaaaggggtccccttagtatcaaggggaaatcagcagcatttttaaacccccttgttggcccttattttgaaacaaacattttcaaagttcccttcccaaacccttcatgttccttggccaattttttggggccatcctttgggattagcccccttagttactcatgacttttccctcccttttctttgctcattaaaaccggcataagagcagatatatcattagtcagtcacctcttcatatagctctaaatcaagcccatgcctgcatctcagctaggatttaagaatgaaaagctttattctctattgaaggaattttaagcttaaat

SEQ ID NO: 3440 - DNA, 250 bp, Bos taurus
  Clone ID: 35-LIB3058-058-Q1-K1-A4
ctctcacccagtcccagcagagaggtaggattcattggaacacagctttctccatgagatgatggatgctcccgggaaggcaggaggaagtggctgacatggaaggaaggacaaggctgcctgcttttcgaggtgaccttgctgggggacgggcccccagatctcgccctgtccttccagcctggtgagacggtgtcagggcctggagaaggagggtgggggcgggccgagcccggacactccagcactt

SEQ ID NO: 3441 - DNA, 449 bp, Bos taurus
  Clone ID: 36-LIB3058-002-Q1-K1-A8
cccacgcgtccggccattgaagattttcaagcagcttgatggcatcaaatctgttttggaaaaaaggaaagctattctgtctgaaaagattagcagagaagaaaggatgccggcgggggagacgagacatgctggagaatgggtaccattattactggaatgtgcaccagctgaagctgattgattgagcctttaaataaataaataaaaaggctggtaaaattaaacctgtatcagtggttgcaaccgaatggtggtccacgtgattccctgcaggatgaggcacctagctagctgttggattcctgcacgaggccaagaagaagccgtgcggacgatgcaccgaacgaatgctcgcatgaaattgaatgaacacacacacagggagggaatgaaggaaggaagctccggtattgatccgtcggccgacagatgctgtctgatcaaca

SEQ ID NO: 3442 - DNA, 431 bp, Bos taurus
  Clone ID: 36-LIB3058-003-Q1-K1-A8
agatcgcgagcggccgccctttttttttttcttttttttttttttttttttttttttttggtttttcttttttttttttttttaaagtttaaatccctgcaaactttattagaatcacctgggggactgctgctcaaaagctttttccctttaaaaccccctttaatctctagagtatactttggccaaggccggggagggtaaatgtctacagcccaacaaatttctcattaccccaactttctcaccagcttatttccattttacagccccagaaaacttaaaggggttttcccacacattcatctttttttggaacctaagggctaaaacagttttttaccatttccccaaaaggggcccttaaggaatggttttatcagggtaggaatcccagtttctttgccatgcatttcttaacatgccctttt

SEQ ID NO: 3443 - DNA, 441 bp, Bos taurus
  Clone ID: 36-LIB3058-005-Q1-K1-A12
gcctgctgcctccgcagtgtccctttagctctctctgcgctaaatgcctgcgctttagaccagagggtgcgcaaagcagaacgattagtccggacctgccttggtgaccccatggcatcccctagaaccgtaaccgtcgtggccctctcagtggccctgggactcttctttgttttcatggggactatcaagttgacccccaggctcagcaaggatgcctacagtgagatgaaacgtgcttacaagagctatgtgcgagccctccctctgctgaagaaaatggggatcaattccattctcctccgcaaaagcattggtgctcttgaggtggcctgtggcattgtcatgactcttgtgcctgggcgtcccaaagatgtggccaactttttcctcctcttgctggtgttggcggtcctcttcttccaccagctagtcggtgat

SEQ ID NO: 3444 - DNA, 443 bp, Bos taurus
  Clone ID: 36-LIB3058-005-Q1-K1-A8
cggacgcgtgggaacaaggaaaaattgttgaagggggttggtcatgctgagatcatgtgaacagccagaatgccgtgaggagtacagcggtagcccacagctctattattctttagggaacgactcacactgatatcagagagtgatgtttgctgtcatgcacatgagccaagctgcctgaacctctatgatgacagcactcatgagacctgcctggatggggtctaaacttctacgccttccctgccccatctgcatagaaatgaacactctagcacggctgtagcaggcacgtgtgtcgggaaatgaaacaacttgtctgagagttcattgagttatgcttaagtcactccaaaggtacttcgttgcgtacacacatgaacacagatatatatgcggatgcactcgctgtcgattcagactttcaactatggggacaaaaa

SEQ ID NO: 3445 - DNA, 229 bp, Bos taurus
  Clone ID: 36-LIB3058-007-Q1-K1-A8
cggacgcgtggggttctagatcgcgagcggccgcccttttttttttgatggatgaagagggaagagaggagattgtaatagatgtaaatacagtgctagattgatgaaaagaaaaatgaaaataagtatataaagaaattagaatataaatagagtaatgaaagtagtaagaaggataatgaaagtaaattaataagttgtaagggttaaaatattttaaaattgaata

SEQ ID NO: 3446 - DNA, 381 bp, Bos taurus
  Clone ID: 36-LIB3058-008-Q1-K1-A8
tcggttttactgagaagtgtgtgtcctgtacacagttggaggagtctgaaatgtcagctgggaccgctcagcagtgatccttgggcggaacgcgtcactttattatttaaggaatgtgtgtgtagagtcgctgtttatgaacagtactgtgtgtggggttgggttttagtttgttcccgcttatttgagtcctctcatttcagcctccctcccacctccctaccggcctggctggctctgctgatgctgccgcgtgtgcggagccgggcctccgtggcttatgacccaggaccatgtggactgtggttcccacagccatgacctgcggtgcatgggggctttgccaccccttacttcatagcagaccgggcacgccgtgca

SEQ ID NO: 3447 - DNA, 57 bp, Bos taurus
  unsure (12),(16): unsure at all n locations; Clone ID: 36-LIB3058-009-Q1-K1-A8
tttttttttttntttnttttatttttaccatttttattggggtttactttttttttt

SEQ ID NO: 3448 - DNA, 434 bp, Bos taurus
  unsure (415): Clone ID: 36-LIB3058-010-Q1-K1-A8
ggaggctgccggcggctggtatcctgttctccctcccaggttggcgtctgggaccttaggtgtcgttacaggcacagcgccgctcacaccatggcttggatccggactgcgcaacaacctttcgagagacgtgggtctttggagcctctttagtcccaggccgcaggcagctccgcggcggcggcggacggaaagtatctctttttaggttgatatggcaaagacatgaaacacagggagatgtttggcagactctgcagggctgtgccaacgctggttgtttgttgttctcagaacctctgggatggatggactcttcctgagcagctatgctaatttgcagcagctggacgatgttcctcattaatacctgcctgtaggcataatcgtcacatcatctctctctggtggcggngaactcagctcaaagtctg

SEQ ID NO: 3449 - DNA, 442 bp, Bos taurus
  Clone ID: 36-LIB3058-012-Q1-K1-A12
aaaaaaaaaaaaaaagaaagaaagataccatccaccctgacgctggttctcatgctggaagggtcgtgagaacacctagagggctcactcaaagccagaccatagggcaccgccctagaatctctgatcttgcacatctgaggtgggggttgagcatttgtgactccaacaagctcccagtgctgctgccgctgctggtctagaaacctcacagtaagcgcgctgctctagaggcctgagactcctaggtgtgtgccccctgcccttctcccgcagggctgggaaaagccacgaggctggtggttctcgcgagatctggggcttcccattgagcagtcgtcacccttccctgcctgaagccgaaggaggggctatccacagcccaggcaggatcaggtgtcaggtttgttgaagtgctcaacagctcctcacttgggctgat

SEQ ID NO: 3450 - DNA, 349 bp, Bos taurus
  Clone ID: 36-LIB3058-012-Q1-K1-A8
ctatatcttaaacttctggaagctagcgtgatatgttaatcctgagtatatgcttttggctgtgtattgaccctgtggatttgtctctctaagaaaagaagctgagcgccttacccggtgcagtcctgcacctctctctctccctttctctctctctctctctctcccctcccctggagttatctggaagggaattcacactgtttcgcattcttcttgacacacatctgctgccgtcaccgtccccccacagtgttcctgggagtgaagacacggagtccctactaattgcccattgtagggaacaaagaaagccaatggttcttctgtatagattgcttctcatgca

SEQ ID NO: 3451 - DNA, 423 bp, Bos taurus
  Clone ID: 36-LIB3058-014-Q1-K1-A12
gttctagatcgcgagcggccgccctttcttctgcacctctgctttctaaggtgagatgaacactgctctctttttttcccaattcattatcttctctcatggaattatttaatccacaggaaggctcttctgatgtctgataggaagtataacccaaatccttcttctctgagtagtgacatggtgtcccatcacctttcatgaatagctcactctttccccactaatgtgaaaggcacattttattaaatactagattatttttaaatattgcatctgtttctcagtcttcttttttttccctactgatttcctattttcacactggtggattcaatatgtcctcacaatacttttaatctgggatagcaaatatactattaatatgcttttctaaaaatctttctctattcccacttattt

SEQ ID NO: 3452 - DNA, 479 bp, Bos taurus
  unsure (388): Clone ID: 36-LIB3058-017-Q1-K1-A8
tgcaaccgtccgcaggaatgcatctggtttcagatttcaaatcccgtgtctctcaggcccctggattcagaactcaaggccacaaatcataggcatgaagcactttcttaagactccaccctaacgttggatggctccccatcgaatgcctgcatgctgcttgaatggcaccacccgcatctgcacgaccacaggcgtcaagagagttgctcagctccggcgtgggccacgctctacttctcctgtgtgactcttgtaagggccccttcactgaatgtagaatcggtgccaagtttgtgagaagtgtccattctttgtcaacttgggatatcagtccagcctcacatttcccactggaggttgaggcttggtgtgaacaccaccttgngccatctcagcaccatcagtggacgaagatggggctgctaatacactctagaagccataatcagaatgctcgaaggacctggataaacagc

SEQ ID NO: 3453 - DNA, 378 bp, Bos taurus
  Clone ID: 36-LIB3058-021-Q1-K1-A8
agtctgggctagttgagagatatgatctgcagagcctccgagaaaagcacgcggaggacaaggttctgcgaagagagagactcagaggcagtgtgggaagtgtagtccagttggcttagcggatgattcggggtgggcgcctaggttccggaaaaggactgaacaggcctgaaaagagactgtgactatgccttttaactcagtagctggagcacaggaagtgttggttgaatgaacgacctatccattgaggacctattcagacctttaggataaccctgtgaactgtattgatttcatgatgctgcgacgaaaaccaacccgactagagctgaaacttgatgatattgaagaagttgagagcattcgaaaggacct

SEQ ID NO: 3454 - DNA, 465 bp, Bos taurus
  unsure (397): Clone ID: 36-LIB3058-022-Q1-K1-A12
tagttattgagtgtcatttttacagatgtccgacactcttgagaaaacatgaaaaattgtggttactcttttggagtgacactttaaaactaaaattataatcaaaggcttcttgaataaaatatactgtaatacagagataatgcagtctaaagggacaaattgcaggaccctgttaatttattttgaagatttatctaaattttagctcatgcatgtctctttcttaatcccattgtttctactgttagaaattagagtttagtaaattgtgatatgcatatatgtattttacatgatggattctaatgtctaactttccttttctgatctcaaaaaaaaaattcaactcataatgcagggcaaaagtgttcaactgttccctcaagcttagctntatactgttgacctgagaaagagtgagatttagacttgtctacttataaaaaattttttacagcatag

SEQ ID NO: 3455 - DNA, 420 bp, Bos taurus
  Clone ID: 36-LIB3058-023-Q1-K1-A8
cggacgcgtgggtaatactgtgtgtgttgctattttattctgtcgctgaattgtgtgtgtgtgtgtgcttttgttagatggcccagttagctgtgttgagatatagctaaactaaaagttttcttaggcattttctgcatttgctctattttctccccccaaaacactaagctgtactgaacagttcatatctcaggtgcttacaggatcaatctaggctttattttggtcataataaatacattgctatattactgtatcagtttttaaagtgggtctttttgacatttaaaatgtattttcagtttatagaaaccttaacaatgtccttaatacttttgattgtaaaatttcataaaccatggaattttaaatattttaaaaaaaattattttgaaaaacatcacagaaagcctgtta

SEQ ID NO: 3456 - DNA, 429 bp, Bos taurus
  Clone ID: 36-LIB3058-024-Q1-K1-A8
tcccggtcgacccctcgtccgctcgagcggacgttctttactggtgagtactactgattgctaggctggttggttgtgctgcatgtagacggacccaaggaagacaggagtgcctgtaacatgggagcaagcgcggtaggccttacagactctcggccgagccgtataacctttggtcaggcccgcaaagcctctgaccgggcccgtgggagcgtctgatgaaccggtctccgccttgctctgacgcgtcgtcacggcgaagtccctgtcctgttgatgggagaggagttctccgttccaacaaactgcggagtaagacgggattaggatttcgaacacgtaaattggctctcgtttacagttgacggactctgaaactagctgcagtttattgtaaagtcagcatgaaatgatgtcgaatggtctttt

SEQ ID NO: 3457 - DNA, 345 bp, Bos taurus
  Clone ID: 36-LIB3058-025-Q1-K1-A8
cggacgcgtgggtctagatcgcgagcgtgccgaccttatagtcttctgcacgctaatgaggatatgatgtacaatattatgctaaaagtaaaaactcttttatgcctaaccaactaatacaaaaacacggatgacagcgcctgcccctagtctacaagcctggttttcttgccctctgcctcatgccccaccctgctcccctcccaccacctactcttagaagcctcctctgaagacccccgaaaagggggccacccctttagtcttccactcttgcctgggggagtgcccttttcctagcctggtacttgaagactggtggggctgaaggagggatggtcaccc

SEQ ID NO: 3458 - DNA, 420 bp, Bos taurus
  Clone ID: 36-LIB3058-026-Q1-K1-A12
atacatgaagaaaaacagatatactcactagttaacaaaaaatgtccaagggcaaccacaacagatcctaatgagccatataataccgaatcccgagcacagggaatgttttcaacatctaaaattcctaggagtttaaagggctaggaaaaattaaaaattacattgagttaaagaatattttacttcagagtggtttggcaaagattaaaaacaaaccatcctgctttggtatctaatatgaatgaatctaaaatggaaaccttgagaatttgaccacaaagtactaagtagtaaattaaacctgaagagagatgggatcatgcttatgccataatttgttaatcagctggtttggagataggggcatacattatttcatgagctctttgaatcgctctctggaatctcttggggatt

SEQ ID NO: 3459 - DNA, 403 bp, Bos taurus
  Clone ID: 36-LIB3058-027-Q1-K1-A8
ggaaaggactccaggtctaagcagagtcttgaaggactggtggctggaggagaagagggggatggagagggaacagcatgtgcagagaggaccagcagcaagaaggaaaatgtttctgtgagggagagaggggtctggttgcaggggggcaacactgataggagaggagtgatggggggcagagttccaaatcaaagctgtgcagaagcagcccgagaggccagaggaggatagaagcggccagcatggtcgggtggctcagctgtgcccacgggatgctgtcgcaagagcgcccgctggtgcccgtgtggtgggggcggcgctgggcgcataaggtgatggtgacggcctgaggagtgggtgggagaggaggatgtcagttcagcaagtgtggacaattctt

SEQ ID NO: 3460 - DNA, 279 bp, Bos taurus
  Clone ID: 36-LIB3058-028-Q1-K1-A8
gtgctcccgggcccggggcggagggcctcgacagcgccgatggccccaactgaggggcctgcggccggctgacggtgccgccgcggcctctcactctgctgcacgcggccatgggcgtgggctcggcgctggccctgctcagctgctccgccctggtctggcacttctgcctacgccagcgctggggctgcccccgccgaggccgccccagccacgcagggctttgaggctgcccgggcttccccagggggagacgacagcccacgaaggccagactga

SEQ ID NO: 3461 - DNA, 389 bp, Bos taurus
  Clone ID: 36-LIB3058-030-Q1-K1-A12
atttggtagacactatttttgagttgttcttttccccacttaacataattttgcatgcatatttctatgtattggtctagagtgtataattttagtggctacatagtatttcttgctgaattaaggggagtcatgtgctggggtttagtaggcacttgttagacatttgtttccaggttcagtaaaacccagagttgaaaaggcgctgttttccgcagaagctctgctggtgggaactgtggctctggaggctctgggagagcctggcatgggtgatgtcctcgtgcctgcctgccaggtgacacccagcctctgtagccggcgacctgctaggtaagtgtgtcgtcggtgcagacgtttaagtgacagatagcaagtgatcattagag

SEQ ID NO: 3462 - DNA, 388 bp, Bos taurus
  Clone ID: 36-LIB3058-034-Q1-K1-A8
gttgtagatcgcgagcggccgccctttgtctttttttttttttttttttaaagaattgagttctttatttgtgatatccataaacgttgctattctatacgtctatccaggaaggcaattttctcctataccattgttttgttttactttttataaacaacaacttgaattctattgcatgaaagggctacaaatatacatttgttaaccaagcagaatacacagatattttgctttacaacttgcacctaagataccagtacacgaagctggttcattagttatcatagcaatttggggccactgcccaagctatgcatagcagttttacagtttcaaacctcatgtagaaagggcagtcgtgatatggaccattaactacattcct

SEQ ID NO: 3463 - DNA, 93 bp, Bos taurus
  Clone ID: 36-LIB3058-037-Q1-K1-A8
gggattgcagatgttaccaaattggattgaggcctctgcactaaccgctggagagacagactcctcgaaccccaaagcttcagggtgttcatg

SEQ ID NO: 3464 - DNA, 417 bp, Bos taurus
  Clone ID: 36-LIB3058-039-Q1-K1-A12
gttttagatcgcgagcggttttcctttttttttttttttttttaaatgtcatcatcatagtcttttaatattttacataaaaaactgtatacacagcttatagaacttttatgtaaacatcataagctcaccactgtcatttgtcagtttatttaaaaaataaaaaaaacaagacaatttagtagaagtaccaccggatggggaagggagggggagaagagacacaagggggaggtttattctctgtacagagatgcagagaaaatttcacacagctttagagactgccttgagggaaaaaaataaaaacaacaaaaggttttagataggccctaatactggttactgccctttatcaaaagagtgcgcatacgtgcacaaataaaatcgcaaaatagaagtgttgccacttttttc

SEQ ID NO: 3465 - DNA, 440 bp, Bos taurus
  unsure (376): Clone ID: 36-LIB3058-039-Q1-K1-A8
gaaagaccaccttgctactgcacttaattctactttgatatagtgattaataagaaggacatcatagaagccatggagctgtctggcccagcggtttaattccctcggggcctgtgtcccagaattctgcccaatagaataggtaccacgagatccaggggaccacatgcgatgaacagcctccttgcagaagcctaagtacttcacatgtcaatacaatagctagttcgaatttcatcaaatcttcccaggactgccctccactatccctatcacctcatgctgattaagaaagagacccacgacctcaccttcggtaaactgaccctggaaatcaagcctaagtcagacttttctgatatatcccatttacttnccggatgactcaaaaaggggcgggggatcccctgaatgtcacagtttcagaatgtcttgattga

SEQ ID NO: 3466 - DNA, 412 bp, Bos taurus
  Clone ID: 36-LIB3058-041-Q1-K1-A12
cactcgtcgggggcgcactgaatcaggagttcgtgggcgcctctgagaagtgccgagccgagggcacaggcgtctatgtaccttgccgcgcggggccggtgctgccaactgaaggctggtggtgccgtgcgcgattagatcggctggtgcgcgtccgttgggggcgtgtgcaagcgtgagcactctgccttgaccgtcccccaccgtaccaagaacccgctctctagttccgctgcatgagtgagtgcgtgccgctcggaccgtgcggctcactcctgggttgcttgcggggtgacctccaagggagcgggcttgggtatccatctactcagtcacgatagcgcttaccgaagtagctcacagagcgtctctgcgggtgtcaaagaaagccgtcgagcccttctgcatacgc

SEQ ID NO: 3467 - DNA, 312 bp, Bos taurus
  Clone ID: 36-LIB3058-042-Q1-K1-A12
gctgcttgttgtctaatttacagggatatttaattttataaggcatttgtatatttacacagctgtaattaaattgcacattgaactggaaaagcaagctgatgcgctcgtagcacctgttggtacttggcacccctcatcccggttctactcggcttctgtatcagggcttgtccgtttcttgtttgacatgggtccttcgtttttcccttttggttccctttttaaaatgtgattgttaacctgctctttaaaaagaagagactaatcctgctgctgctctcagaaggtttgctgaatgtattttcaata

SEQ ID NO: 3468 - DNA, 372 bp, Bos taurus
  Clone ID: 36-LIB3058-042-Q1-K1-A8
cacgaattcttaactcatactgtctattttaataatctgcttgaggtgatccaaggtgttaggtgaatcacaacttgatcatcatataccagacctggatgtttatttcccacagttaccttctccttgataaagcaataacactgctttaagtctgttgcctaatagcatgtcataatcctctcgtggatggtgattttataggaaagtttgtatgcatatcacccaatctatcttttaaaaattaaggaatttaaatgtatgctggacctaatgacaatatattgtggcattttattttaaaaattggggaaagttgcatatttttttaaaagtaggcatttgagtaaaaaaattcgaaagtactttttt

SEQ ID NO: 3469 - DNA, 319 bp, Bos taurus
  Clone ID: 36-LIB3058-043-Q1-K1-A8
agttgttgtacaaggaatgaataccccatatcgtcttcatttactcacctgctgagcggcattcacattgtttgcagatgttagctgacataaattgttacaaatgtttgtgtaaaaaaaaaaaaaaaaaagccccctttttcctaggatgtctttactggagatgggagaagagatggagttttcatgtaactaggacttttagtggcctgctctgatatgctggaatccctgagacatgtatacaaactacacctcaggccccatgagtcttgttagatatgtcaagcctttgatattaaaaaaatacctctatact

SEQ ID NO: 3470 - DNA, 432 bp, Bos taurus
  Clone ID: 36-LIB3058-044-Q1-K1-A12
gagaaagtaaatactacagctaagtgatttcatggctatatttatttttttaaatggaaaaataacttgaaaacaaaacccctattctatttaagtctgagttcttgtccaagtcagacaggatgctccacacctgatgccctgctggtgtctctcggcttctttcttctccatattccctctttgggatgttaggtacttcggagactcccaaactccctgtagttaaaagttatccctattcatttattcattggtctgtctcttccacaagattgtaggtaaggattctgtgccccaaatatgcctggaagtccacactgctgccaaaatagacacacatccaagaccagagcaaataatgaggccctgcctggtcaactcttaactgcaggcacttctcaaagagaacttcagctaagtcagacgcct

SEQ ID NO: 3471 - DNA, 198 bp, Bos taurus
  Clone ID: 36-LIB3058-044-Q1-K1-A8
gaggagacagacgttcccgggccagatttgcaagattctcaacaccatataccgtacgggaacccgattcctagcttattactacaacaggataaactctaaccactggataaaatctacagagcaataatcctgaagctacactacgaacatgcgcaatctgcaatcatacaggcacaggaccaatgacaaatactg

SEQ ID NO: 3472 - DNA, 427 bp, Bos taurus
  Clone ID: 36-LIB3058-045-Q1-K1-A8
ttgttttcaggtttaaaacttatatttgcataataaaaagtcgagcattccatggtaaaatcatctgaacacataaactatggcactctgattaaactgcattctcaaccattacacacctagcaccagaccccagtgtacattgaatcagtccttgctgaagcatcatctcactattgtacatgcttgagataggcaacgcctggatgattcacggaggacagaccgtgtatgccatagtattgtgccaagtataacggcatacaaaatacttggactcacctgatctggatcctacagacgatcctttctgggtctgcatctctctatgacttgattgcttttagaccaaagcaccatacgcatacttaaagaccatatccccaacaaacttgacactttatagtacacttgacactaatatagt

SEQ ID NO: 3473 - DNA, 454 bp, Bos taurus
  unsure (429): Clone ID: 36-LIB3058-051-Q1-K1-A8
cggacgcgtgggcggacgcgtggggcagtacgaccccagccggcggatctcagccaaggccgccctggcgcacccctacttctcgtccgttagaggcggggtccctgggcaccagactggcaggtgccaaggagagcagaaagcctccctgggccgccagcaaggccctcctagtgcccctcggccgccctgccctcagctgcagagcaagacccccaaggaaggggttcccccccagctgttctttttagatttaaaatgttatgggggaagagctgagttccagttaagagtcccaggttaaaacaggaggcggagcaagggggagaggcctttttcctgtcccgaggggaggtcggatgttctaagtagctgtcttctcaccatggatatgctttatgttgtatgcctctggcttcaagaacaganaataaaagtgatgtatccctgaaaa

SEQ ID NO: 3474 - DNA, 321 bp, Bos taurus
  Clone ID: 36-LIB3058-052-Q1-K1-A8
ggaccctcagcagggagcttatatagtcatcaactgcagtctgggttgggccttcttaaggggcactgaggtcagtggggtgaatcccttgacctgagagaggcaaggataagctcagctcctgcaggaatgccaggaatttggccaaggggcaggcagattggggtcaggtgtgcccccttccccagccaccagcctggggcttgtggtttctacaatggggagttaaaggaatcccgtggggataggaaactggtcagtgcagggccaggctgagtcctctctctatcccacacctagagggagaggccacagtgacta

SEQ ID NO: 3475 - DNA, 421 bp, Bos taurus
  Clone ID: 36-LIB3058-053-Q1-K1-A8
ccctgctgctgtggtgcttctcagccctgctccccaccatcgtctactactctgccttctttgaagcccactggacacgctccggtgagaacaggaccaccatgcacaagtgctacaccttcctcctcttcatggtgctgctcctgccctcgctgggactgagcagcctggacctcttcttccgctggctctttgacaagaaattcttggctgaggcagctatccggtttgagtgcgtgttcctgccggacaacggcgccttcttcgtgaactacgtcattgcctccgcctttatcggcaacgccatggacctgctgcgcatccctggcctgctcatgtacatgatccggctctgcctggcgcgctcggccgccgagaggcgcaacgtgaagcggcatcaggcctacgagttccggtttgg

SEQ ID NO: 3476 - DNA, 415 bp, Bos taurus
  Clone ID: 36-LIB3058-054-Q1-K1-A12
gtcttcgaagacttgataaaatacacagaattgctcctgttgtattctatattaccgttagttggcaaaaggaatggggttaagattaaacttgtttccattctctttcttatggatctacatccccatgtttaactgacacattgggggctcagttgtgtgctgtaatgtcttattaaagaagatattaaagaaaactaaactagtctaatttcttctacattttaggaggtttttacattgcctcttcccagtttaaaaatttttttttttttcaattcacaattgcctcttgagtgtagaattggtagttctaagggtgacaggagatttctttcatttttagtgttttccctttatctgtttgggatctataggatacttaagaagaaaagggaaaagccttgcttagaac

SEQ ID NO: 3477 - DNA, 423 bp, Bos taurus
  Clone ID: 36-LIB3058-054-Q1-K1-A8
tccttagtcagtgatcgtgctttttgttaaaatcagttcttcagacctgtttttaggacaggtaaacatgaaaaatggaaaaaaatcctccaatcttagggttgatttaattttgtgaagaaaggtagttctgtggttcccatcggtccccaggtaggtcttggggacaggaaccagtttgtccttggagaccccagtgtagaactgaagtttgagaaaggggagaggagtaggtgagctggccttgggattatgacttttgagaaaacaaactcttgagactggccacctggagaggatacgggggtggagaggacgtggtgaggccccagctgagccaaggggccccccttgccgatatcaggacccctgtgatgggcaggtccccaccctctcggatactcaggtctctgcctggaagat

SEQ ID NO: 3478 - DNA, 401 bp, Bos taurus
  Clone ID: 36-LIB3058-056-Q1-K1-A12
cttcaatttcctcaagtacaccctctggccatgcctggtcctggccctcgtaccctggctggtgcacatgttcagtgcccaggaagcaccacccatccgctcttcctgactctggtgcctcctgcacccaccttccctcacaaagcccatgctctgtgacctccacccttgggaggcagctccgtccacttccagcccccagcaaccctgctcatgttgaattttctacttctcccaccacctggtcacagccccaaagaggggccttttctctcccaggaaggtcctcctgccttccctcccaagtccccaaagagcaaaggcaacagtgagaacagtggatttctgtaacactgtgaggggctcggagcagccccaataaagcccttccacacctctgg

SEQ ID NO: 3479 - DNA, 234 bp, Bos taurus
  Clone ID: 36-LIB3058-057-Q1-K1-A8
tcgcgagcggccgccctatatttttttttttttgttggcgacagttttattgacatgaggctgagctttcaggttttctatcttgtactttagcacacagggtctgtctccgtcaccactgtcacctacgtgtctcagaggcaggctcttcacatgcctgtcgagccccactcttcatgaggtttctgagatgcttttcacagagtgccctcaggtttggagggatgaaaaggg

SEQ ID NO: 3480 - DNA, 445 bp, Bos taurus
  Clone ID: 36-LIB3058-058-Q1-K1-A8
cggacgcgtggggcgaggtccctgagggtccagggtgggcgaccctccacgcccaccttctgccctgggacggccttggacgcggtcctggggaccctgccgccgggcccccatgcagagtgtggagaccggcctgtggctctgagcttcctttggtttctttcccgcctcctctcacctcttaaagcacttcctttcctaaccgatcacagcggagcggattcgcggcgggagctttggtacgtggcaggcgggcgggcagctgggagtgtcccgtgtggtggccgcggctcacaccccggaggagccggatcggcgcgtgcggagaagggacgcggtgcggactcggccgggcctcggggggttccgcgacggcgcatgcgcgcggtgaccgcagctgcccccgcgacgacctactttctacggagcccggacggagggcgga

SEQ ID NO: 3481 - DNA, 395 bp, Bos taurus
  Clone ID: 37-LIB3058-002-Q1-K1-B10
cggacgcgtgggcttattctgaagggttcagccatatgttgacatcctctttaaagcacttgaaatctgtggaatcagcacagaaagatttcttggaggcaaagcaccttgccgcacaacttgttcttgatatccttgattctattgtaccccatgagaaccgcatattggtcaagcttcttgagacatttgaaattgagttgagagacatggcccgtgctttgtatgattcagagttggacgatggtgatctaatgaaagcacgtgaacatctcagacagcaagttaagcgctctatggaatcagaatccaatgcacttgctgtgactctaataacacatttttccatccaatgctttgatgagtccttcatcataaaattgattaaaaaccat

SEQ ID NO: 3482 - DNA, 462 bp, Bos taurus
  Clone ID: 37-LIB3058-006-Q1-K1-B10
gcacagccaaaaataaattaattgcattaaaaaacatctctcctcttttggttgctctgctttctgtccaggttcttccagctgctgttgtttcatctttcacatccctgccccatctcctttgtgtctgtcattaaatgttgacacgatccaatattctatcatcagccatcttctgttacattcttcactatcctttgatttcaaatttaatgtcagtctctttccctttcctgaagtccagactcttgtgtccatataactaacatatcaccttcgtttggattttccatgggcacttcaaactcagcatgttcagaatgaaagcctgcttcctcaactaatcggtgtcccctccttcttcccccattttcatgaatgatgccatcacctacttggctgctgaccaaaggacctgaattaaacccttaatgcttttctttccttcatgccccattgcta

SEQ ID NO: 3483 - DNA, 414 bp, Bos taurus
  unsure (76),(81),(87): unsure at all n locations; Clone ID: 37-LIB3058-007-Q1-K1-B2
ccggtatccggaagctgaggaggaccccgcctgcccggagtcagaggaggctgagggatggagatgggggagtgcngcggntccgcnccgacggcgcgttgccaggccggccgcctgcctctcatctgtgggccctgcctctcgtccgctgccgcttctcagcccacgatgcccacccacccccggatggctcgcccgagctccagtagggcccccgctctcatcgcctctgccccttccggctccctctccgcgctctccgaccgccgctgccaccttcccctcctgcctgcctcttgcctttgcttgcgctcaccacttgcattgtccccggcgtaccctgcgcccctcttggcgggagatttttgtgtccccttccccggtgcctctcatgccttttccccccctttttcc

SEQ ID NO: 3484 - DNA, 402 bp, Bos taurus
  Clone ID: 37-LIB3058-012-Q1-K1-B2
gcggtgaaggcgttttttagccgcgtggccgacctggctttcgagcgctcggtactgcaggacttggagcggaggagcaacagcccgctgcaggtcggcggcggggacgtcatccggatggagggacgtcgacccgagaccccggacagcaggaggccctacggcccgagttgttgttagccaggcctgcggcagaggccttcccaccctccacgaggcatgccggtggtgcctccgtgacatggagggggacgcggagcgcccactgtgctgagctccagggccccccgtctgctcttctccgtagcggggcgggagccagaggaggcccccactgccacccagggccccgtgctggaaagccagtcgcacctacagagttgcccatcagcccagtcacag

SEQ ID NO: 3485 - DNA, 345 bp, Bos taurus
  Clone ID: 37-LIB3058-013-Q1-K1-B2
acgggcggagccgtgggcggaccggtgccttagtcatggcagcggaagagaaggatcctcggagcgagttctccgcatacgggagcagcagctcaggctcctcggacgaggaggataacagcgagccggaggaaacatgtcgtaagggtcaagatacagcgaagtctgccggcggctatgggaacaaggcggagaagctgttgcctggaccagacgagctgttccggagcgcgactcgtccggcctttctttacaatccgctcaacatacatatttactgggagaggcatgtcttcaaagctctagatgagccttcaaaggaattcaaaatatggaagtcacact

SEQ ID NO: 3486 - DNA, 402 bp, Bos taurus
  Clone ID: 37-LIB3058-015-Q1-K1-B10
gttttacgtgtgttttcctcatttaatccatatactgcgttgaatatactccttctgcagacaataaggcatagagaaattatctaattgccccagggcaccagctgggcagtgacacagctgaggttcggaacaagacaaccagagtcaggaacctgtgctcctaccagtgtcaaaacttctggagtctctcctgtcacttcctagctgttcacttcctagctggtcttttttatttttaactttttattttgtattggaatatagccaattaacaatgtggatttttcatttgtattataattttcttaattaatggacttttaaggtttccttccctggagtggcaattttggggcaattttggggaataaggttaattttaattccaaggtttaattt

SEQ ID NO: 3487 - DNA, 427 bp, Bos taurus
  unsure (365): Clone ID: 37-LIB3058-015-Q1-K1-B2
ggattgcaaaactgacagtttgaagctcaagaaaggttgatttcagtgaaaatcttgcctacttaccctcctccacggctgtatcacacaatgcccagatgtctggtttttccctcttttaaaggcaaactaaattgtttttcatgctgatttttccccccttgggacttgcttcctcttggaaccaactacatctcctcatttcaatcacttgctatacttattttaatcaaaccagacactggtcatttcaaatctagtaatagtaggcaaaagagtcattctcaagatgaaattttagttttgtttgcattttcagaacttgttctgggagtttgaaaaagcaaacaaatgccacacaccgncttgcctgctctcttctctcccatacccttaacagcttgttggggccagcagaatggttcat

SEQ ID NO: 3488 - DNA, 120 bp, Bos taurus
  Clone ID: 37-LIB3058-017-Q1-K1-B2
gatctcagccatctatatctagagatgaaagccaacacatatcacgtagctgttacacgtgaatcagatgggtcctgatatcctctttgctctctgacacaaaggtgatcacatccgcac

SEQ ID NO: 3489 - DNA, 354 bp, Bos taurus
  Clone ID: 37-LIB3058-018-Q1-K1-B10
gttctagatcgcgtgcggacgccctttttttattttttttgattactaaagaggaatggtaatcagcacaaacttagtcttgcagttacttcacaccaagaccttttgtgctgtgtatcaaggtttgttgggaaccttaaagactggattgacaatcatatgcatctgctttctgaatgtgcccaagtgatgaaagagaccaggtaccagctcttgcgtctactctagcacctgaataacgctgtccttgaagctcgcatggcatatactgttgcaccacattattttcccttgagagaatgaatgctgcacaaattcttagactacttaatgacaacaccgccacatatcact

SEQ ID NO: 3490 - DNA, 111 bp, Bos taurus
  Clone ID: 37-LIB3058-019-Q1-K1-B10
cgcgaacgtagctttagaaataaccatttaaagataggaccacagtcgtccaaaaaagtccagggtcatatgcaaaatattcactgcaccaactgttcacaaaatgtgccc

SEQ ID NO: 3491 - DNA, 336 bp, Bos taurus
  Clone ID: 37-LIB3058-019-Q1-K1-B2
tagacgcgagcggccgcccttttttttttttttttgaaccagctggaccgctccgacgtggccgtgccggtgaccctgcacagctactcggacctcgagagcgaggagccaatcccgggcggtgttccctagcgcagaggcccatctcccgcatgctcccgggatcccggccgggacgtgcctctcactcagtaccagcgggacttcggcgtgtggacggcgccctcggggtccagagatgcaacgcatggacgcggaccaggagcaagcagccgcaggaccaagcccttcgcaacccccggccggagggtctacgtgctccccatcggtgacgcg

SEQ ID NO: 3492 - DNA, 461 bp, Bos taurus
  unsure (454): Clone ID: 37-LIB3058-021-Q1-K1-B10
gtgaacttggcattggttggggtggggctgaaaacctgggaatgggtagacagtgacaggaaacttgtagagagtcaacagcaacataagttgtatctaaaccaaagcaaggctgatgggggatggattcaagaaacaacaggaagtggagtcttactaactggattggctggggtgtagttatctgggtagacagtgacaggaaacttgtagagagtcaacagcaacataagttgtatctaaaccaaagcaaggctgatgggggatggattcaagaaacatcaggaagtggagtcttactaactggatgcatgagggagaaggacacagccagtaaagagacgactcctgattttggagtggatggtgctgacaccacacaagatagggaactgaaaaagaaaagaagggtattttgggtttttagaaaagacatattcaacttggaacagtntgactat

SEQ ID NO: 3493 - DNA, 437 bp, Bos taurus
  unsure (362),(365): unsure at all n locations; Clone ID: 37-LIB3058-021-Q1-K1-B2
ggagctgcccctgccggcctttgagaagctgagcccctacccaaccccatctccgccacatccactgtatcctggccgcagggtgattgagttttctgaggataaggtgcggatcccccgcaacagccccctgcccaactgcacatatgccactcgccaggccatctccctgagcctggtggaggagggcagtgagcgggcccgccccagcccggtgcctagcagccctgcctcagcccaggcctccccccagcaccagccccggcctgccccgccggcgctcagtgccccggccagctctgccagctccgaggaggacctgctggccagctggcagcgggtgtttgtggaccgcgctccgnccncggccgctgtggcccagcgcacggccttcggccgggatgcactccctgagctgcagcgccacttcgcccttg

SEQ ID NO: 3494 - DNA, 307 bp, Bos taurus
  Clone ID: 37-LIB3058-024-Q1-K1-B2
cttcattagcgcttgggacatcacggtgtccgtgtggggtcggcgtaaaggggtgagggaactgggaagacacatcgttaggtgtgggggcagtgctgggcctcaaggtgcctgcacccatgtcgactctgaggagttcaagctctgggtcttcttcactcctttggccaaaagcaggtgttggagaggtgacccagtggagggcccttgagggggcgctggagtggtcagtgctctgaacggtggtctggtcacagttgccttgatgggttccaccagccagagcagctgataatgctgttccgac

SEQ ID NO: 3495 - DNA, 154 bp, Bos taurus
  Clone ID: 37-LIB3058-028-Q1-K1-B2
tgacgtgttaatcttgaattccaggaaaggtagctactaaggaatggccacaagccagtttttgatgccagacctactgacgtcccaaatgtttctcagaatacatttaaacgatttaactgatcttgttttactacacctcttcatgctttat

SEQ ID NO: 3496 - DNA, 360 bp, Bos taurus
  Clone ID: 37-LIB3058-029-Q1-K1-B10
atttggtagacactatttttgagttgctcttttccccacttaacataggtttgcatgcgatagttatatggatcggtctatagtgtataattctagaggctacatagtatttcttgctgaatcaaaggtagtcatgtgctggggtttagtatgcacttgttagacattagcttccaggttcaataaaacccagagttgaaaaggcgctgatttccgcaaaagctctgctgctggtaactgcagctctggaggctctgggagagcctggcatggacgatgacctcgtgcctgcctgtcaggtgacacccagcctctgtagccggccacctgctacgtaagtctgtcttcagatcatacttt

SEQ ID NO: 3497 - DNA, 175 bp, Bos taurus
  Clone ID: 37-LIB3058-031-Q1-K1-B2
tcccggtcgcccacgcgtccggatgcagctgcataaaccacctatgctggctcatgctgcattcaccagctcaaggtacataccaaatggacgttttgggggaggctcccattaccacacgacacacacatgcctatactcacacttcctacttacacccatgtgccgtgtatac

SEQ ID NO: 3498 - DNA, 190 bp, Bos taurus
  Clone ID: 37-LIB3058-032-Q1-K1-B2
cctgggattactttctgtgtgaatttcttatactagcagtaagctacagttgctggtggagaacatttctgggaagaaaatgaatcaggttaggagtatcaaattttatcttctggattcccttgtgccctggccattgagtggtaggaaccagtcaaaagatgtgttagtttagttgctggacagagag

SEQ ID NO: 3499 - DNA, 433 bp, Bos taurus
  Clone ID: 37-LIB3058-034-Q1-K1-B10
ctttgatctgggttacatgtgattctaattatcatctataatactgctgtactttccaaacttacacattttaacaaaaaaatgtggggctttttgtttgtctgttttggcaggccacgtgacttgtgggatcttgattcccccaccaggcaacaaacccaggcccagagcaaagtaaacattaaatcataaccactggaccaccatgcaattccaaaaaaaagtcctttttttaaagaaatcataaaatgatttttaaaaacccattattaatttacattttggcattcatcccattaattttactgtttatcaagagtgttgtccatgaacagtttacatgatgatcctggtgcaggcaggtgcacacttaggaatcagaatctgacttttcacctaattccacaggtgagttatcactgaatacatgttg

SEQ ID NO: 3500 - DNA, 437 bp, Bos taurus
  unsure (374): Clone ID: 37-LIB3058-034-Q1-K1-B2
atctggggcactgcgtccctgtagcccatttattaagaaccgggaaactaacgctgtcagacagtaactctatcatcagtgtttttgatagcatcagtggagatgctcaaaacattatccagtttagttttgtgtgttgtgttttttttaacttttgtgttaaaaatggggggtggaattagggaatggaataggatttttgttccatagtctggactgtatagacagcaccgttttgattcaggcattattatcacactttgggtttgatttgatgcccgcaaattggccatcttggaaggctgaaggcagaggggtaggggtcgggcaccttcctggaagctctcagagctgcagacaagctttgtgagcangcaggtgcagtcggtcccaaatgctcatataaagggggaggtgactcatgtgaccctgtgaaa

SEQ ID NO: 3501 - DNA, 401 bp, Bos taurus
  Clone ID: 37-LIB3058-035-Q1-K1-B2
gtcaaactaaggctgatgccaagtcttttacagagatagttttccagtctttctgtttgatgcaaagagagaccaaaaaaatatcaaactaaaattaaaaaaaaagaaattttcttacagttttcttgaacacatttcttctttaaaacaaaatgctgttgatatcttcaattttgacatttcaatggttaaaaccctttgagagtgtcttgatctcattcagtgatgcctggggtgtattaatattttccacaaggtagaagtttcctgagttacacttcactgctcatcaactttgcacttcactgcttccccaaaaacctgcaagaaagtttaattactttttcatttgattttctgaaaaaccgaaaggtgattttctgaaatggtattttaaaaag

SEQ ID NO: 3502 - DNA, 443 bp, Bos taurus
  Clone ID: 37-LIB3058-037-Q1-K1-B10
cggattaccggccgacccacgcgtccggtggagaatatgaaacgttcactttggtttgccctctatttaagaagaaaataattgtggattcatcagaagtagtcacacattcagctgatgcatttgcacctgtggcttacctacgctttttagaattgcacttggaggacaaggtgtccccagtacctgacaactgcagaacatctaatgatatacacaactcttgaaaaacattttttgttactaacctgctatttctatttaaatttaaaaattacatagcattgtcctaattattttatgccactttttctcattacccttttttttaattcttagaaatatttactttatcagaaattagtagaaccattgactggttaacacatcctgtgcatcatctctggtagatttttcttttcccttttacttcatctgcagtc

SEQ ID NO: 3503 - DNA, 378 bp, Bos taurus
  Clone ID: 37-LIB3058-037-Q1-K1-B2
tcgggaggacgcaaaactaagtgcagcaaataccatcttcagggagtataacaccccacactgccgatgaataccttggtctccgtatatggtcactaatctatatataacacatatctaaaaacacagtgtactatatagagtctacatgtaagatttcattctgtggaatcagcatttagctctcatcttggacaaaagcaaaacatttgcagacaaaaaagcaaagagttaaagtttcatttccagttgttgtcagatcctactaagcaggataaaattaaaaaattattaatgcagataactttggtatttctatttgccagcattcatctatcttcaagggataaaggtatctatctatgtatgtaccagtag

SEQ ID NO: 3504 - DNA, 424 bp, Bos taurus
  Clone ID: 37-LIB3058-038-Q1-K1-B2
gaaaccttgaacctgaccagtgagcttttgcatatatgcagtagccctgcccctggccgtggaaaagaatgggaagagtatgtgcagatccggtctctagttgagaaaatacgaaaaaagcataaaggtctgtctgttacttttgatggaaaaagagaagattactttcctgatctaatgaaatgggcctctgaaaatggagcctctgttgagggttttgaaatggtgaacttcaaagaagagggctttggtttgagagcaacaagagatatcaaggcagaagaattatttttatgggttccacgaaaattactaatgactgttgaatctgctaaaaattcagtgttggggcccttgtattctcaagaccggattcttcaagccatgggaaacatcacactggccttccatctgctgtgtgagc

SEQ ID NO: 3505 - DNA, 396 bp, Bos taurus
  unsure (315): Clone ID: 37-LIB3058-039-Q1-K1-B2
gctctggacagcagtgccggtgcgactatgccggtcaccgggaagactttccgccggcgccgcgccgactcggagtcggaggaagacgagcaggactcagaggaggttcgattaaaactggaagagacccgagaggtgcagaacttgaggaagaggcccaacggggtgagtgctgttgccctgctggtgggagagaaagtacaagaagagaccactctagtggatgatccctttcagatgaagacaggcgggatggtggacatgaagaaactaaaggaaaggggcaaagataagatcagcgaagaggaagacctncatctggggacatcattttccgcagaaaccaaccgaaaggacgaggatgccgacatgatgaaatacattgagacagaactg

SEQ ID NO: 3506 - DNA, 420 bp, Bos taurus
  Clone ID: 37-LIB3058-040-Q1-K1-B2
gtgcctgtatctaaagaaagaaaccagtaaatagctgtactgattaatggtgcaaagtctgaggtaagtattttgtttattttaaaaataatctcaaacttcatctctaaacttaaacttaatattaaaataaagaagctcttcagaagactactaccagaaagagctgattatccatttttatttcatttaccctagactgtttcttggaatggctagctaatataatttaaataacagacctgacaatattagatagggtctttcccatgaaagtgggagactaatgacctttattttcaattgccataatcctgattacttccgtaattgtagctggcactttgatgtctttgtagttacccaagttttctaactagtttttatagagtatctgtaattctcatttgcagggttatg

SEQ ID NO: 3507 - DNA, 398 bp, Bos taurus
  Clone ID: 37-LIB3058-043-Q1-K1-B2
gacattagttcttcagtccctatctgtatatgattgtgtaggcctgggcaaagatgcagttaaccaaacctcactttcctttttttttttagttaaggagaaaagtggtaaaaggaaactctttgaactctccctgatcgttaaacaaaggtagtcaataaaaacctcagctcaaggaatgatagcccatttcatgttcttaccctgactgtttaaggtgccaactcaaacactaccctcattcattcttagtcaacagagacaagtctgttgtgggggaacggtcgaggttcaaacagatctcatggctaccggtggctggcaggggccccatggctcctcttcagcctccaggtacccctctctcagagcagggagagtcagcagtttgccagggc

SEQ ID NO: 3508 - DNA, 358 bp, Bos taurus
  Clone ID: 37-LIB3058-049-Q1-K1-B2
gcgtggacgcgtgggtggacatgtgacattgtatatgcttgatagtcggacgacacagggaacagggctccagtgaccgctggggccgccagtcaaaatccgtttgcctgtctccatggggaatcaggtggccgccattcccttgatacttttgagcccctgtggggggcggagggcgatggggaaccctcacctaagacaccgacaggagcccaacttggggggcgctgtgaccagcgtacgcggaaacacacaaatggatgaggaactcaagatgtgtgaatcacttgccttacaatctgtacagatcgttttaagtactaacaaaagggaattaaaaaaaatacctcacgccaca

SEQ ID NO: 3509 - DNA, 388 bp, Bos taurus
  Clone ID: 37-LIB3058-052-Q1-K1-B10
gtggagaccggcctgtggctctgagcttcctttggtttctttcccgcctcctctcacctcttaaagcacttcctttcctaaccgatcacagtggagcggcttcgcggcgggagctttggtacgtggcaggcgggcgggcagctgggagtgtcccgtgtggtggccgcggctcacaccccggaggagccggatcggcgcgtgcggagaagggacgcggggcggactcggccgggcctcggggggtcccgcgacggcgcaggcgcgcggggaccgcagctgcccccgcgacgacctactttctacggagcccggccggagggcggaagcggcgcagctcagagcggtggcaggacgttccgggagcctcgcggtggccgtggctatcgcg

SEQ ID NO: 3510 - DNA, 362 bp, Bos taurus
  Clone ID: 37-LIB3058-052-Q1-K1-B2
caggaggcatgggccctggagcggcttttgcgggaggcccgagtgcttgaagcagtatgtgagctcagcaggcgatgggaaatacctgccacctctgcccaggaagtggtgcagttctcagcctctcggcctggcttcctgaccttctgggaccaatgcacagagggattcagccctttcatctgccctgtggagcgggtgctcctcaccttctgcaatcagtacagcgcccgtctctccctgcgccagccaggcttagccgaggccgtgtgcgtcaagctcctggaggatgccctgtgccagaagctgccccggaaccaggcacgccctggagagcagctcaccgtcttccagatctggag

SEQ ID NO: 3511 - DNA, 420 bp, Bos taurus
  Clone ID: 37-LIB3058-053-Q1-K1-B2
ggatgagatgctcacttagaagcctagtacctgggagggaagatagggctggggaggcgtctctgggagctgtttgggggggagtaggtgggtgagtcaccagcctccatcaagaatgttgtgggcaagctgtctgtccccttttgctggtaaccaggaaaatgtccctgcaggaagatctccgcatttcctcgggatgttgtcccggaatgttttttcttaggctggtttcctttacaagctgcaattatgttctcttcccacacacgttctgttggtggcgcttctccgagaaactgtcttcgtgatctttgggatggctgtgggctggaaagttcagagaagagaacggagcatgagctcctgtggagccaaatctggctttgtgtacataagacattcacaaacgctgcacccagt

SEQ ID NO: 3512 - DNA, 276 bp, Bos taurus
  Clone ID: 37-LIB3058-056-Q1-K1-B2
aggcctgtccttcttcaaaccacagcctggaaacttcgatagaaatttctgcgtaaacttatacaaagtcacgggacagtttccttggagctcgctccgggagacagaccgaggcgtgtcagcagaggacaggtttgccacctggaagacgagccacacggtcaagtgggagggcgtctggcgggagctgggctggctctccagggtcgcgtccttcgccgttcggaaggagagcgggcactcggtgaagtcgtctctgttacactcgatggtcat

SEQ ID NO: 3513 - DNA, 439 bp, Bos taurus
  unsure (27): Clone ID: 37-LIB3058-057-Q1-K1-B2
cggacgcgtgggtgcaggcagacgctntaacctaagccctggaccaacccaataaggggattaaggaattaaaccttcttgaagaaaggaattggggaaaccaccttaaccaaagacctggaaagtggaattgaccaggaatgggaacccttataggtcttttaatccacaaaatctaagctttggccctgccaaagaaaattaaagaatggtattgaatttgaagttgaaaaaaagggttaaaagaacctaaccagtttggttaacaagggataaattggcttcattttcttaaacacacatgcctttggacattcacacccattttcattgacccaagaacttgccggattttcaggtaccagtgatttaagccccgctcagaagacatgaagaggactggggtctgtctcagcaatgagggtgtgtgtgggtgggt

SEQ ID NO: 3514 - DNA, 279 bp, Bos taurus
  Clone ID: 38-LIB3058-001-Q1-K1-B6
tcggacgctctgaggacccacgagccgtttttaacctttcccctagacggctggccatgctggcatttacaacctccatccatccctacctgtgtggaggcacattcacacagtgacgcctaaatgacttgctcctactgaggagtcacacacggatctagaagactcgcactgacaacatctacagctggggacactgtctcacatccgagcattccaccaaatgggtcttagtttactaacagcttgaatcatactgcggacaagctgatgaaaacc

SEQ ID NO: 3515 - DNA, 252 bp, Bos taurus
  Clone ID: 38-LIB3058-002-Q1-K1-B6
tcccaattcgagccacgcgtcacgcccacgcgtcacgacacacatacgaatagaagctatgagtgcatatatatagctattgagatgcatgctcctctcaaatcactgtgccgtggttctcaaaaaatcatgtaatgagagttatatatataactttattctaccatttatttcaagaataccaatattactggaatggacctcatttaaagcttattgatttaacccttaaaaaaagggcttaccctttta

SEQ ID NO: 3516 - DNA, 118 bp, Bos taurus
  Clone ID: 38-LIB3058-003-Q1-K1-B6
gtcgaaagcaggtagtggctgtctgtgtttattgggctggtcagcggtactacatgtgtttgcggagcggcatagatcatgaacctgcgcatagagtgatttcatgtgcaactcctcg

SEQ ID NO: 3517 - DNA, 441 bp, Bos taurus
  Clone ID: 38-LIB3058-005-Q1-K1-B10
aaagcgcgtacccaggacattctcagaggcggcggttatggtgcgcactgggtcggtggagagctcgagctaaagggtgatctgctagagagtgatctctaggtgaaaatcagaaaggaaatttactataatcaagcatgatggatccatgttcagttggagtccagcttcgaaccacaaatgagtgccataaaacctattatactcgtcatacaggtttcaagactttgcaagaattgtcatcaaatgacatgcttctacttcagttgagaactggaatgacactttctgggaacaatacaatctgcttccatcatgcaaaagtttacatcgacagatttgaggatttgcagaagtcatgttgtgacccatttaacatacacaaaaaactagccaaaaaaaatttacatgtaattgatttagatgatgccacttttctga

SEQ ID NO: 3518 - DNA, 424 bp, Bos taurus
  Clone ID: 38-LIB3058-008-Q1-K1-B10
cgagaggctgctcgggcgtaaaccactgaccagagtcctgtcctcctagacctctgaaaagtcagtggccgagcgggtctgttaggtggggctgagctgagaggtcagacctgtgttgtggccagagttcacgcaggtcaggatagtcaggtgtcagagtgaacagcccgtgagtgaggcccgagacgggagccgctgccgtcagtcagtcgtctgtcccggagcagcccggggtgctggtgacacgcatcgccgtggggctcgtgcagccgctgacttgagtccagcagagcgccggtgattgaggacatggagattagcagtgcagtgttctgaacctgctgactgtcccttctgactagcatttcttacaggaactgtgacgaattaaatgcatgttgacaactgcaaaatatgtaagtgc

SEQ ID NO: 3519 - DNA, 136 bp, Bos taurus
  Clone ID: 38-LIB3058-009-Q1-K1-B6
gagaaactctgttttctaaaattatagaaaatttgcagtgtgaaattctgtgaataccaaggccctgccttcctctctccggcaactcagacaatgagctgccttgagtttcaagccaacatcataacctctatgt

SEQ ID NO: 3520 - DNA, 434 bp, Bos taurus
  Clone ID: 38-LIB3058-011-Q1-K1-B6
cggacgcgtgggagaatccagacaaaacgggtgtccttgaaaggagtcaagtgtctctgccagacatgttcggtgtcagccttcatctcactaaacagagataagacaggttttgcagggggggttgcctgttgtgtgcactggtgtattccaagcacctagaatacagttgactcattgacccttaataaaaatgtgttgaatgaattagtgaatgaagggtgggtaaaggagtaggaggaaaaatatacatttttatctaacttgaatgcaaatccgagtcctagttgagttctcagtggtaaggtcatcagaaacctcagcagctggcctagaaattcataatgttgagtattaccattcacctaatgacaatttatagctcactatgtaaataattgggctttcctggtggctcagatggtaaaagaatt

SEQ ID NO: 3521 - DNA, 270 bp, Bos taurus
  Clone ID: 38-LIB3058-012-Q1-K1-B10
caaatgtgtggcctcaactggatttattattcacccacctataaaggttgggaatcaggggtggttcagaaatctcgagcttgtgatgcctaggttccgaagtaatgcagtgctttggatggcataagaactgattcagtctgtgattcttggacagcctgatcctttgtagagggagaggatcccggaactgtgttcaggtgatttgggcgagggaggaggtcatgcaggaaacacgatgtagcgtaagccgcttactatcacctgcat

SEQ ID NO: 3522 - DNA, 414 bp, Bos taurus
  Clone ID: 38-LIB3058-014-Q1-K1-B10
gacaaatgattctatgtagctttgataagttgtgcaatcaatttatacaatagaatactgtccatacatactaacaaactaaaaaacgatagaaatgcagtcattgcatagcataaagcagactaagaagaaatatacacatataatgagcagaattcagaccaaatgttagccatgaggagtctggaagataaaatactcttaataaacacttagattaacaccaaaaagaaaaaaaagaaaaaccaagattaacagcatcacagaaattagagccatatttcttcttagtctgctttatgctatgcaatgactgcatatctatcgcatattagtgtgttagtatgtatggacagtattctattgtataaattgattgcacaacttatcatagctacatagtatcatatgtcc

SEQ ID NO: 3523 - DNA, 119 bp, Bos taurus
  Clone ID: 38-LIB3058-014-Q1-K1-B6
ccacgcgtccgcggacgcgtgggtcgcgagcggacgacctgactgcttgttccagacgcttctccgaagagagggacacttgaatgcaccaaagagcatcttcatgttcatgggacgca

SEQ ID NO: 3524 - DNA, 410 bp, Bos taurus
  unsure (396): Clone ID: 38-LIB3058-015-Q1-K1-B6
ccccagacctctctcctcagggacccctggacttcttatcagcctgcctaggaattgactctctcagctggattgggccgaatactctagaagtgaacctggcaggccaagtgcaagttaaacaagtacaccaaagcaggaggacttgaagggcacccggcaggtgccctagcaagcccgctggagttaaacactgtagccctttgtccgtcccctgaatagtcagctgttactcaagttgagaacagttagacacagccgtgactggagtctggtttctttggtggcactgctcctgggtgagcagctgggtacaacagactacgctggacagaggagcctggtgggcacagtccacgggccagaactggacacgaccgagcgactgagcagcangtgtggatggctga

SEQ ID NO: 3525 - DNA, 390 bp, Bos taurus
  Clone ID: 38-LIB3058-018-Q1-K1-B6
aagacgcgtggtgggaggaggactttttgggaggcataggctgtggacattctgaactgcagataggagggtgcagacccgataggaagggagttcaggaggggaggaataaggctaccggaggtggaagtgagacgggatgaagccctgagagtggttagagactagcttcatgcctgcacctactttcaggtcgatcgaagttaggggtacgtagaatgccaccatgccttgctagctatgctaggcgtacaattaggacggatttagaaagcatgcctcagagtagcgatggcttatatcatattgaccacagtgggtatcgatggatgtcgcctatacagacagtcatgtgcggtagtacctgtgccacagacgactatgacgagt

SEQ ID NO: 3526 - DNA, 306 bp, Bos taurus
  Clone ID: 38-LIB3058-020-Q1-K1-B6
atcgcgagcggccgccctttttttttttttttttttgtcttttttttttttttttttggtttgttttttttatgtcacgacgggtttaattccccggagcgcggcccgtggggcaacccgggaggggggggtcatgttccttttccaggtttgcccatccccactttcaagctcttatagggaatttatgtgcatgtattatgatgcttttgtttaatatgaaaagtgatagaacttatatcttttatgaagctacacttttatggttgtttttggtttttacttttttccctattgcactctttt

SEQ ID NO: 3527 - DNA, 389 bp, Bos taurus
  Clone ID: 38-LIB3058-022-Q1-K1-B6
ctgagccccagagtcccccttccttctggtgctcacagtgcaaggtccctttgaaactagagcttatatgaatgcaaactggccccagagacacacgcctttacatttcagtaactgtgtgtcattgctacctgcgggaagccagctttctccatcctccctgaagtgagaggggtccccccagagaagctggaggcagaggtggtggctcctcaggcagcccactcagcaagcttcagagttcagagcaactagctccagtctcagagcaggttgtacatcatctccatgttacagaagaggaaactgaagctcatagagcttccgacagttgcccaaggtcacacagccagggagcgggtttgctgagacccatcccggttggccgt

SEQ ID NO: 3528 - DNA, 236 bp, Bos taurus
  Clone ID: 38-LIB3058-024-Q1-K1-B10
gaaatgtttactaccaaaaagacaatgaaaataaaatttcccagcggccaccttgctccctggcccatgggcagtcgagctggatctgtggggtttcccgggagggtggctccggctggaacactctcagcaagagtggtggagttcctgtcaggccctccgtcggcccactttgggcttctcctctctctctccttacgtgcaagcgaaccaccagaggtggccttcctctgacc

SEQ ID NO: 3529 - DNA, 406 bp, Bos taurus
  Clone ID: 38-LIB3058-024-Q1-K1-B6
tcggaccgtccagggtgcttcagtagcgccagggacatcacggtgtccgtgttttgtctgcataaaggggtgagggaactgggaggacacagcggtaggtgggggggcagtgctgggcctcaaggtgcctgcacccatgtcgacgctgacgtgggcaagctctgggtcttcttcactcctttggccaaaagcaggggttggagaggtgacccagtggagggcccttgagggggcgctggagtggtcagtgttctgaagggtggtctggtcacagttgccttgatgggtcccaccagccagagcagctgataaggctgttccgacaggtgggtccagaggccctgcgtgctctgctctgcagccatcgttgcggtgatgtttctgtgcttccccatttgcttatggc

SEQ ID NO: 3530 - DNA, 409 bp, Bos taurus
  Clone ID: 38-LIB3058-027-Q1-K1-B6
gtagatcggacggccgcctttttttttttttttttttttttttttttttttggtgagagaccatctactcaaggtttattggaccaaaggctgatccagaaatccagccataaggagtacatgaggtttgggcctgcaagccacattcaaaagtgtccagacaaacttataacctggaaagagtcacctattttttaatcaaaccttggcctgaacaaggacattttttactaccgctgtgtggggcaggggctactcacaggagcacatctgctattggttacgtggtgctgtgtgactctgcctttgttccctgttccttcctaaacccatgaacctaaagtactagacccggaaaagaaggtccctgggaatgtaacctgccctgggaactgacattgaacgtttc

SEQ ID NO: 3531 - DNA, 394 bp, Bos taurus
  Clone ID: 38-LIB3058-028-Q1-K1-B10
cgtgactgtctccaggccccaggctggcttcttgcagcccatgagaaggtgggaggagtgggtgtggacaaccggtgtgtgtgtgtgtgtgtgtgtgtgtgtgcgcgcgcgtgcgtgtgtgtgtgtaggtcattgcttcgtgtgtttactccctccccacctgagagaggaagaaccctcagcagaaacagtttacttgccgacttgccatttttgccaaaaccgagatgttgaaggatgcgtccgtcgccagcgtcggggtcccggcccgtcttgggacgccttcgcttccttctctgtagccagattttgaaaacttgttagtttcactgggatctgtttcacagtggcctttctctatgtgccttctgagaaatttgtctctttttgtata

SEQ ID NO: 3532 - DNA, 273 bp, Bos taurus
  Clone ID: 38-LIB3058-028-Q1-K1-B6
atcgcgagcggccgcccttttttttttttttttttgctttgctttgttttggttggggtcattcaatcagtatggaggctttgcacttgtttggattaaaaaaaaccagatcagaagtaacgctttctccttaaggtcgtctctagacttgtggggacatttcaaaaatactgcaaacgacatccagcactgttcactaaagggtcgtgaataaaaacccgccccccaccaagtgcgtcatggtccggctcaaattcacgccttccgttttca

SEQ ID NO: 3533 - DNA, 121 bp, Bos taurus
  Clone ID: 38-LIB3058-030-Q1-K1-B6
gatgatcttcgctgctgaacatgtgagagctattctgagtctgacagattgcaattgggagacagagtacagctttaatttactgcttgttgtggacagttgaattgtagatcatgctgtg

SEQ ID NO: 3534 - DNA, 175 bp, Bos taurus
  Clone ID: 38-LIB3058-031-Q1-K1-B6
tgggattagcctttgacttattctgtgcatgggtaagtaacttatttgtgcactgttttgttgaaccttacggaaaccggaaacattctcttgagtttgattgacttattttctttttttgttcattttttatttaatcttattattttatttttttttctttttcttttattat

SEQ ID NO: 3535 - DNA, 354 bp, Bos taurus
  Clone ID: 38-LIB3058-032-Q1-K1-B6
aaaaagtctgatttccccaaatgggctgtaggctgggactcccctgagcttctcaccggctgtggctgacaccaggatctcccgttagagctggtggccctgtcacctgctaccgtcactgcagccttagaaagcctggggggccctggccaggctggcctctgatccgtgaagtcagactttcacaagcaaaggctggagatgggtgtagggagctgctggcgagaccctgtcccaggacttgggtctcctactcttgaacgcttcccttctcagggcatgagaggggtccagacagcatgctgggcactggtcagatggtcattgtattgatagcttatatgggcacggtca

SEQ ID NO: 3536 - DNA, 416 bp, Bos taurus
  Clone ID: 38-LIB3058-034-Q1-K1-B6
cggacgcgtgggaaaataatccaagccgtatgcacaggtgggaaaaacatttttttttaagtccactcaaggccagtaatttatctgacaaggtattttaccacattatcttgacatttgatatatgagcctattagaaattgcaggtggtttcatagggcaaaatccaagtggagagggatatgtggggtttctattaagagataattttgttattgttttacctgtccttttacgatcctaccctgctaggttagaatgggttaattctccaaatttgttacttatcttttagggaaatttttacaaaagcaatggtctgatgtcaataacattttgaagtatagtgcacataacttccccagactattccaacctgataatttgtaaatgctctagagttttttaaattaaca

SEQ ID NO: 3537 - DNA, 436 bp, Bos taurus
  Clone ID: 38-LIB3058-036-Q1-K1-B6
gtgggggtcaggccagggcactccccttcaggtggccctggctccacccggagcctcgcactcccatcacgctctcccagggtccccccgggggacaagcagggactcaaccctgctgagtcttcccacccttggtccacttgcctttgactgctgtccacaagagcagggctccaaccctcagggagctggcccagctgctcaccttccctgggctccctccaccccgacccctgccaccctgggaactggcatgaaagcacgtaaccaagcttcctggggcagctgctcgagaagacaaagacagacagacgccctcatcccgctcgagccctgtgatcgtcccgtgtgctaggccctcactgacccgtgtcttcccctccccgctggctcaacctgggcaaagacccaccttgtaggagcaggccccttgagt

SEQ ID NO: 3538 - DNA, 434 bp, Bos taurus
  Clone ID: 38-LIB3058-038-Q1-K1-B6
gtaaataccaaatagtgtgttggtgatacttttcaagtggttaaaaacatttaaaattgtgtattcagaatatctgtcactactctgtcgccaaaactcagaattgaaccacgatcttatatctgagtccctgaggtcagatgccatagtaacttaagagtgaccactgccactttagtgttagaatttttaaatatggaaaacgacagagttgcctgatgtgatgaggctttcagtagttagagttttgcatgagatttgaattcttcagtcggaccctacattgtccactcacagtcgttaccataggaaatctggcaggattgtacaactcagttactcccatcttttgagctactggccgggaaaagaaacagaaaagaaaagcagaccatgttaagcctgtgccagttgtttggctagaagatgataaa

SEQ ID NO: 3539 - DNA, 424 bp, Bos taurus
  Clone ID: 38-LIB3058-039-Q1-K1-B10
ctttgtgatcaaagaaactgtaggctgtgtataatgcatccaagttcttctggtgactctttgccttttacatatatccaaaggccttatttttaaattaggttagtttaagttgtacataaaccatctttgccctcctagaggccatgccccctgcagctctggcagctgcttctttcctatttccactctgtcttttaattttacccttgtatttcaagaacttctggttttggttactgtctccagtgggtaaagtagctagatttctttaagcatgtgtgtttatacagtttgggagtagacttgacttttcagtcaaatccttacttcctcactcagtgacacattgtggtccctgtgtgctatgtgctcagctgcttcagtcgtgtccgactctttgcgaccctatggactgtagccc

SEQ ID NO: 3540 - DNA, 371 bp, Bos taurus
  Clone ID: 38-LIB3058-046-Q1-K1-B6
aaaaaaaaacacatacaaaagagtttactgattagtttaagttgacatgaaatgtgaagttggtcctagtttacatcttagagaagggggtgtacttgtgtctgtttcatgtgcctaaatatcttcagccacttttgcaaaaactgtttcttccaggtaaagtaaaaggttgttagttacttgatagatgtttgacagacgtggcacatttgctctagtaactcataaatctgaagttagctctgtgcagtcttctgtaactagtgcatctcccggacacccggagggagaaagcactttttcttgctctgagttagacatctgaagtgtcagttacctttgcagaacatgtgcacaaccctgaataatgt

SEQ ID NO: 3541 - DNA, 332 bp, Bos taurus
  Clone ID: 38-LIB3058-047-Q1-K1-B6
atgttatttaagatatgagcagtttctctttacttactgatttccctgaagtttgagcgccgagaaacattagggaatgggacctccctgagcctggggtggtggcattcagacccacctgctctcccggcaggtagtatttacaatgtgctgttacttgagatgaaagagaggcaggttaacagtagccacagcggccaggaacccttagaggaagccattgtgcttacaccctttggaaggtctgtgcttttcaaaggagagactcacagagagatctcaaagggcttggtctatataccaaactgtgccgtgtgagaaatgggtcttta

SEQ ID NO: 3542 - DNA, 92 bp, Bos taurus
  Clone ID: 38-LIB3058-048-Q1-K1-B10
gcggaagaggctcacgtttcacacagctgaacccgagagaatggtgtgaactgtcggtggggagtgcatgcaagaggcagactgagtgccct

SEQ ID NO: 3543 - DNA, 442 bp, Bos taurus
  Clone ID: 38-LIB3058-050-Q1-K1-B10
atttttaaaagtatggtaattaagcattaaatttgctaattggttattttcataattgtgttaagtattaatttttcacttccttgagcctgttatactgtattattaccagattgaggcttgaaaaatccctcatttgatagattagatgaaatccacccttttattcatttaaattttcatttctttagaatattttccttctttagaatattgaaaatttctacttctttgtatttattgcccatctttatttccttgataactaacttccactttctaactactcctaatgctgccctcacaagattaattcagctattcttagtgattagagtttgtatatatcacttacataattttatacctattgatattgtttccctatgagattggaagtaaaaatttgtctaagaacaatgcctgctggctctcaggatac

SEQ ID NO: 3544 - DNA, 315 bp, Bos taurus
  unsure (262): Clone ID: 38-LIB3058-058-Q1-K1-B10
agcccctggagccagctgagaagagcacgtcccatgcgggcgtgctaaagataaacctagatggcagaggctcaacaccgcacctgcctcctccaggggcaccccctgcgggcctgtccacttccgaggtcagggtccgcccgggcgaaggctcccttccacttcagatgcccagcggggcacttttggaaaccgaagctcctcctgctgggcctgcaggcctggacctcgccaggggagaggggaggacggagagatggtnctcccaacctgaaggccccgttaaactgaaggtgtccagaaccgacgggccat

SEQ ID NO: 3545 - DNA, 437 bp, Bos taurus
  Clone ID: 38-LIB3058-058-Q1-K1-B6
ccaggatgaggaaggatctgcagatgctggatgctcttctttttcataacatttaggggaatgatttgcaagattccctaggtttattctaagaaattctactctctataaaagaagcctgagactttcgggttccttcctttctctgccctgacctggagggtcctagggagagcaatgcctctccaaggggcctcagatgcctgagccgatggggagggaccaggaaccacctttgtcccaggggcccatcttcatatgctctttcttcccaagcctcttaagaatctcttccagaggcctcatggagctacctcccccaaggcgatgaggttgggaacaaaatggggcttctgcgagtagaggtgggagaccggtgagatgtcccctcggcaccctgctttctagcatggacctcctcctgcaccatggggctc

SEQ ID NO: 3546 - DNA, 325 bp, Bos taurus
  unsure (99),(102),(111)...(112),(194),(252),(256): unsure at all n locations; Clone ID: 39-LIB3058-002-Q1-K1-B12
tccgcccacgcgtccgcaagcacacgagaaaaggaaaatcacaatgagctcatgggttaccaagtcgctgccttttctcgtggctccggcagtggcctngcncactggcgnnctccagctcaccttcatggacagagctctggtttccctgcccgtgtcagcgatgttcgtctacgagaaccccatcgatcgtncggccgagaccattagaagagctctgtcccgtgcgcttgttccctactacccaatggncggncgtctcgccgtcactggggaccagctgaagctcgcgtgcaccggcgagggcgtaccgttcgtcggtgcg

SEQ ID NO: 3547 - DNA, 145 bp, Bos taurus
  unsure (126): Clone ID: 39-LIB3058-002-Q1-K1-B4
cccacgcgtccgaacaaatacgaaagaagcatgagtggatatatatagtattgagatgcatgccctctcaaatcactgtaccggggttctcaaaaaatcatgtaatgggagttatatatataactntatctcaccatttatttcc

SEQ ID NO: 3548 - DNA, 435 bp, Bos taurus
  unsure (356): Clone ID: 39-LIB3058-004-Q1-K1-B12
ttcagttttgactgttaaatgtttttgtttggagaggtaacttaaatttggaaaatgcactcacaagagttagggcctagattgtaagctcttacagcagccacatttgttcctgggcttttctaaacttgttcctaagttttgaggtgctttgctctttcttgtgtgacctgatagctccctggaactttgggtctgtgtgtgacagatgagactcagagttggggttctctggctctgaaggtcctgaaggaactacattatttctggaagatgactccatgcaacgatcgctaaagaagctgaagaaaggaccagacttcaactgggaatgtgactggagctgatctggctgngactgatgaaccagaagaagggctggaggatgatattatgtttggggactttgatttctgtgtgagaccaaaggaggag

SEQ ID NO: 3549 - DNA, 71 bp, Bos taurus
  Clone ID: 39-LIB3058-004-Q1-K1-B4
cggacgcgtgggggcgcatgtacactgacattcaagaacccatgcttaatgctgcacaagagcagtttggt

SEQ ID NO: 3550 - DNA, 377 bp, Bos taurus
  Clone ID: 39-LIB3058-006-Q1-K1-B12
ggaacgcagactcatgcagtgacatcggtctgggcaacggcagaacgctaacaggtggcagagcacagcggaagtcgggacctctgcgactctccctaatccgctctccaccgtgatcgcactgttcaaatcgtgctttgtagctctgcacggacattccagcgattgcatgttgaaatcgaatggtacactcttgtaatctctattagatagcacgtacacagacacagctgtgctgatatacagatagtaacatactggcatgtgccagcaagctcactggcgcttgcagagtgactcattctgtgcataccttggaccatagataccctggcgagatccacgcgcacagcttaacttctactcattcttcggag

SEQ ID NO: 3551 - DNA, 200 bp, Bos taurus
  Clone ID: 39-LIB3058-006-Q1-K1-B4
aataagcctaacaagcatcaagtatttatcctatggtgagtcaggggctgtgggtgtagagttcactgttagtgtatttagtgctggctagaaggctaggtctcggccttggacacgaagtcctaaggacaaagcaagagagtcctgtatcccccatcaccttctgaatatggagggcagagaggactatctaggctgtt

SEQ ID NO: 3552 - DNA, 200 bp, Bos taurus
  Clone ID: 39-LIB3058-007-Q1-K1-B12
gctagttctagatcgcgagcggccgctcttctttctgtgaggagtggccttttcccgtggttgactttttcatgatcataaaggcgttcatggcactcttaagatcctaatagaccatttgcctcagataagacaaataaccgatactaatggcctaattgacctgattgagctcaatatacattaaccatttagaacgg

SEQ ID NO: 3553 - DNA, 414 bp, Bos taurus
  Clone ID: 39-LIB3058-010-Q1-K1-B12
gattttccacagattctatagtactattgacaatctgagttagagaaggattgtactggtacgctgtttggcaccaacaccttcagggattggagcagcttttttccttggaagagtattcccagtgaagctgaaatgtacagcccagtgcagctttggttcatattcagtcatctcaggagaacttcagaagagcttgactaggccaaatgttgaagttaagttttcaaataacgacttttaagatacctttattaaaggggaggggcaaattttggcgatttgtagttggcagtggcttgtaatgattgggatggggggggcgtgggtttaggtaattgtttagtttttgattacagataaactcatgccagagaacttaaatacttaaggtggaaaaactaaagaaatctc

SEQ ID NO: 3554 - DNA, 421 bp, Bos taurus
  Clone ID: 39-LIB3058-010-Q1-K1-B4
cagtcgtgtccaactttgcgaccccatgaagtgcagcatgccaggctttcctgtccatcaccaagtcccagagcttgccttcaatatgtataacttttgaaagaggactttccttgatcggtcccctacctttttctctcccctaaaatatgaagcgttggaatagctgaacagcgagagagttaatccacagttgactcgtggtcggtcctgtgtccttggttactctgcattcgtgatcagcagtcacagacggagcgatatcgtggtgtttcccattgagagcacccatgtgcggggcacccgtgcagagcagacctgccccgttcaggttggctgtacactcggttaagtctcagaaggcatttgtttgcttctcctctgaattctcgctgagtgctctcttcgatgtttttgaata

SEQ ID NO: 3555 - DNA, 438 bp, Bos taurus
  Clone ID: 39-LIB3058-012-Q1-K1-B4
gaggagctgcatgtgcggacggttggcgatggggacagccgtcatcctgagggttctcggcactttcagagttctccgtatacctgcccatccctgctcacctacctctcctttcctgtcttggctcagcattttaagaccatgaaaagcatgccgcattcacttcggtgtacatgaaggattcaaagaatacggaatcggctggcgacagtctaaggtacatgttgacattgggcagccagagacaccgtcacgtgcttgtcagcctcgtttccgggggctgccttgtaggagagaggcgtggatggaccctatcaacagctcccataggctgagacgtggccttgctcacctgtccctggtcacggtcttaagttagggttttcagaatccatgctctgggtatggctctgccggacagtgaagcccctctgtccc

SEQ ID NO: 3556 - DNA, 439 bp, Bos taurus
  unsure (368): Clone ID: 39-LIB3058-013-Q1-K1-B12
cgacccacgcgtccgaggggaatccatctagaccgagaaaaggtaacttcgtgtttcagctcctcttgtttcgctggtacttggttggtgtgttgtcaataacattcctgaatgttgagtgctctatgaaagctggcctgtcacctcggtaatttagaatcaaggaatgactcgagacagtggggtgtttcaggtgtcgtggaggtgaggtgagatgggccgtgtcaggaaggaccacgagtgaggaggaaacctaaagatgagtgtctccacgcggacgcacagaagcgtcatcgagacgcagcgcaggtgtgtcgtcacgtgatccctgctctggacacacctgcgagatcctttctggtcacttncgtgtctcttctctgggggctgctcttggacatgggcacggggatgtggcacactttttaagagaactcga

SEQ ID NO: 3557 - DNA, 341 bp, Bos taurus
  Clone ID: 39-LIB3058-016-Q1-K1-B4
aggaggagggcggcagcaggcccagggctctgtgcagagggaggctggggtagggaggggtggcagcccagggcgaggctaaacgtatcagcactgtggtgaagggatgaaggcagagagtcaggaacggttccccacgaatgtgtcagaggagtgtgaaacgatctgaatggaacaggaaaggttacactggggggagctgggaggataggagctttggaggctggacatgtggacagacagtgtgcgacaatgtgtctgaggcagagacggctgaactgtgttgagcagcggatgggagactgagaagggtgcacacagcagatgagacaactcaagcc

SEQ ID NO: 3558 - DNA, 439 bp, Bos taurus
  Clone ID: 39-LIB3058-018-Q1-K1-B12
cggggatggagagtcggtgggatctctttacggcctctggactggaggccgagcgcccgcccgcggccgagccccgcgcccggcgtctccgaccggggtgctctccgcagtttcctggcttggaagcctcgggaacatggcgaggcagcggtggtttaacgggaaggacggtgactgttagcctgtgaacgaaagcgagagtgagccggctcacgctccggaccaagagtgatcttgaacttgtggctgctactagatttttgcccacacctcctcgtatgctgcggcttctccactggagtggggccagggtgaccgtggacttgccgcaagtcagacggctgcaggtcacagcaggtccagtctatccacctttgagcggcggcggcatgtccttccccaccctcgatgacccccgctggcttgacccccagaaact

SEQ ID NO: 3559 - DNA, 109 bp, Bos taurus
  Clone ID: 39-LIB3058-020-Q1-K1-B4
gacggtgactctatccggatggaccaagactgcagaccaacaactgcagtactgtcgtagtggtcaaaccagcaccgacagatccttcataacaagggcatcagtgtct

SEQ ID NO: 3560 - DNA, 292 bp, Bos taurus
  Clone ID: 39-LIB3058-025-Q1-K1-B4
tggatggagagtcggtgggatctctttacggcctctggactggaggccgagcgcccgcgggcggccgagccccgcgcccggcgtctccgcccggggtgctctccgcagtttcctggcttggaagcctcgggaacatggcgaggcagcggtggtttaacgggaaggacggtgactgttagcctgtgaacgaaagcgagagtgagccgcctcacgctccggaccaagagtgatcttgaacttgtggctgctactagatttttgcccacaccttcttggattgctgcggtttttc

SEQ ID NO: 3561 - DNA, 165 bp, Bos taurus
  Clone ID: 39-LIB3058-029-Q1-K1-B4
gttttctcattttccctttggggaaactaacatcaatgctgactgcctccctgacgctgttaattaggcacctgggacgggagggaaagtaaggccttgctggtgagctgccttgtgcgtggtggtaactttttgttttttacaaaaataaagaccgaagaactt

SEQ ID NO: 3562 - DNA, 341 bp, Bos taurus
  Clone ID: 39-LIB3058-031-Q1-K1-B4
cctccccagatcctgcttcattccacatgctgtctttcttatccaaggaactgaggggtacccccaaccctccgcagtccctgccccttcacccccacctcccacgagaacagattgacaccgaaaggcaggggtctgtctaaaccaggggaggggagctgtcaccgatcaccaaggtccctttatctccccagcctcatcctacttcccacctttacccctatttgcttcctgctcaactctgacccctgcttccccttcaataccccctggaatccacctggtgagtgctaggacctgaggccagaaagggaacaggttggagaagctgttctgtctgc

SEQ ID NO: 3563 - DNA, 429 bp, Bos taurus
  Clone ID: 39-LIB3058-035-Q1-K1-B12
acagtatctggactacagatgtcggatctagattggctatggccttcatcatagtggctgggatctgcctctgcctctacttcctgtttctgtgcttcatggtctttcaggtttttcggaacatcagcgggaagcaatcaagcctgccagccatgagcaaagtccggcggctacactatgaggggctaattttcaggttcaagttcctcatgcttatcaccttggcctgtgctgccatgactgtcatcttcttcattgttagtcaggtgactgaaggccattggaagtggggtggtgtcacagtccaagtgaacagtgcctttttcactggcatctatggcatgtggaacctgtatgtctttgctttgatgttcttgtacgcgccatcccataagaactatggggaagaccaatccaacggtgatctgg

SEQ ID NO: 3564 - DNA, 153 bp, Bos taurus
  Clone ID: 39-LIB3058-035-Q1-K1-B4
aaaaaagggaacccccaagaaaaaaaaaaacaaaaaggcccccacgaaaccccccacaccacaccccacacacaccaaaccccaaaccccaaaaaaaccccaggccccccacaccaaaaaaaaaaaaaaaaaaaaagggccccccacccaaaa

SEQ ID NO: 3565 - DNA, 446 bp, Bos taurus
  unsure (318): Clone ID: 39-LIB3058-041-Q1-K1-B4
ccgggccgacccactcgtccgctcgagtcgcggaggattggccaagaccttagagttggcccaagtgcgaaccgaggttactcagcggggtgcggtccagcgaggtcagatggaggtgggggtctccagagcagaggaggtgggcgcccaccaggcctcctgcgataaccagcgggcagcactgacttgaaaggaaggaggtcttctctcctccacgcgtccttggcagagctccaacaggaacgtcaggctggaagacatctctggactgcatgacttccttaaagctggccgtggcagggatgaggaaggggctgntgtgtcttcctcgggccccgtcagccctgaaaacgagcctgtggccctgaagcagaagcttcagggatgctgccctcaagtgagagtggacgctccagaaaatgtggcctctatttgtctctgggaga

SEQ ID NO: 3566 - DNA, 369 bp, Bos taurus
  Clone ID: 39-LIB3058-043-Q1-K1-B12
cgtccgccatagtgcctggctcagaggtgtcgtcggcgcctggtgagggcccgagagcggcagaggggcgaaacaaaacagggagccggcggagccctcgccgttgctcggcggtttccgggcttaatctcgcggtactgggccgagaggcgacggaagcgaaaggcgagagaagctcggagcactcggcgagaggaagcgtcagggagccttcggcggcgtcgcgagggtcggccgaagccccccggccgctggctggggcccggggtggtgaagaagtgctgcgaggcctagccgaggcctagtaccggctttgtgtctgagcggcgttggcgttggcgttggcggcggcggcggcggcggcggggg

SEQ ID NO: 3567 - DNA, 228 bp, Bos taurus
  Clone ID: 39-LIB3058-043-Q1-K1-B4
ccgggctgcgcacactctcaccctgctctgccttaaagccttggggtctggccggcccctggcctctgcccttgcccagctctgcccactactcccagggccgcggggtgccccgggctgccaggaccgcccgacctctcctggcaggacctggcctccccacgggctgagctcttacacccagtttggatggtggctgctgccggccttgggctgaggggaggggtg

SEQ ID NO: 3568 - DNA, 415 bp, Bos taurus
  Clone ID: 39-LIB3058-044-Q1-K1-B4
cttaactctgtccacaggaccccctgttcctgagtagccaggggttttagataaacaggatcttcctggagggagtgtctccctccccgctcctaggcttaatggaaatctaatttttcccagccagtggatgtctctggttcatcaggagtcaccccttcctgctcttatagggccagtccagggtggcttaaggagctcccaggggaaacaggggcagcgctcgtggtgggctctcgactcacctggccagctccttcagggtgtcacccctggcatggggccgtccagctgaatgcctgctgcccaccagggtgctgcgcctcacccgcctgtcacccgagatcgtggagctcaacgagccgcttcaggtcgtgcggtatggctagggaggccactaccatgcccatgtgga

SEQ ID NO: 3569 - DNA, 442 bp, Bos taurus
  Clone ID: 39-LIB3058-045-Q1-K1-B4
aagctgagcaaatcaatgatgacatgtttagttctcaacatacatacagttctactgagctttaaaacatgttgagaaatattaacattttttccataattctttaagaacttgcagatctaaatttgttcagtgaacagtggtgttttccttgtggaatcgcagcaggattggtgtgtatgtaacagaagctttaacaaagatgtcagctctgggctccctctatttcctgcgtggctgattattaagcctcatcttgggttgctggcgccccctgagcccgtcttctgtactgggagactgcagtccagagcctgcagagaagaccaccgctacgaaacaaacagaagtcttctttagagtgagtagtaaggaaagatgacttcaaagcaataccacacaatacttctttaggagcccttatggcaaaagctatagtatg

SEQ ID NO: 3570 - DNA, 313 bp, Bos taurus
  Clone ID: 39-LIB3058-051-Q1-K1-B12
gtcccccccgacgcaggcccggtcggagttcccccgccagggcctcgcacccgcagggccggtcccgctcgcaggagtcagacgtgcacgccgcccaccatcgccgctgcccggggctggccgagttcgccctgccggccgctgagccgctggcccgggccctggacctgccgccccggccgaagggccccgagcggccgttcctgaggtccccccagggctcgggccgggcccccggcgcgcccagcgggctcaggcccgggcggtccttcagcttccacccgtccgtctcgctgtcgtaggcacccctgga

SEQ ID NO: 3571 - DNA, 405 bp, Bos taurus
  Clone ID: 39-LIB3058-052-Q1-K1-B12
ggggactcccggcgcggagctgagcgcttggagctggggtgcgggcactagaacaacggctctctgcaccgactctccccgcctcatcagcggggaccctgcttcagagcccggtaactcgctgccatcgcccgtgcaacccgagggccctttgtctcccctgcacgtgccgcgccccgcgcgccccgtctggtcgcagagatgagcgagcttaacaccaaaacatctccagcaaccaaccaggcacctggtcctgaggaaaaggggaaagctgggagtgccaagaagactgaggatgaggaggaggagattgacattgatctgacggcaccagaaacagagaaggctgcccttgctattcagggcaagttccggcgattccagaaaaggaaaaaggatcccagc

SEQ ID NO: 3572 - DNA, 390 bp, Bos taurus
  Clone ID: 39-LIB3058-053-Q1-K1-B4
gcaaggacgagctcgtttacgaacactttcatttaactacattatgtgtggaggctctggaattgcatagccaacactgctgagaatgaactgtaagaaataggtgaaaagggccaatacattatagactgtgttagagccaaggtggtcaaacaatcagaggtaacatttagaccactgtacttcaagctataagagtgcgctaagactgatgatgctccaaatgacatgctgcatacattttacaacttggcacattgcattgatcaaaaattgaaaggacatgctacactatgtggtcgacactcagttaaggcttttgctgaaactgttgaccagctaaacatttacaaaacacatgaaccacttagagactctgaaaacgatcct

SEQ ID NO: 3573 - DNA, 413 bp, Bos taurus
  Clone ID: 40-LIB3058-001-Q1-K1-B12
attttaggagtgctctaaggttttggttgctaggacttgaatcccacattgagctctcaggcgtagaatccttgatgtgtggtttctgctcagctgaaaccacatctgctgagctgtcttgtccttctcctactgtgatgtcctgagaatcggaggaagtagcatcatggttattcctaaagagttcagtctgctgagcagccacattcatgtgattcggagccagggtctgactgggcgcctttgtatccctatcctgcaccaccccttctgctgctgccacttgtcagctgggaatagggaagaaagtcaagtttgattccctttacctagcttactttttatcaggttcaagcagttgaatgaaatggggtcattagactatctatgattgtcaaatgtctgttagcctt

SEQ ID NO: 3574 - DNA, 351 bp, Bos taurus
  Clone ID: 40-LIB3058-002-Q1-K1-B8
aaaaaaaaaaaaaaaaaaaaaaaaaaaaaaaaaaaaaaaaaaaaaaaaaaaaaaaaggccggccaatatataagaatccgagctaacatactacatgcatacgggcgcccacttcagtggatccaggttcctaaacgcaatcaattggccgcctatttacaacctcgggtctccgaaatccatttcactgcccgtcttattccaactggcatcacatgcaaatccctggagttgccgtactaattaacattcccgcacatatcgcttttaccagcagtcgcacagcctaaatggccaatgccactcgccctttccaagatcttcacgccctgactgctaaatgggaccccc

SEQ ID NO: 3575 - DNA, 151 bp, Bos taurus
  Clone ID: 40-LIB3058-003-Q1-K1-B12
gccgagggccctggccccgggtctgggccagtgacgatgccgattgtcggaagcactgtgatgggttggaggcggtggaggtcttaaaatttacatgtgatacattgtatctgtacaaaacatacattaatttacataaatgtatgttaac

SEQ ID NO: 3576 - DNA, 380 bp, Bos taurus
  Clone ID: 40-LIB3058-005-Q1-K1-B12
cggacgcgtgggtcgcgagcggccgccctttttttttttttgtttgtggctttcattgcaatggaagattttccatgaactgagcagcaccggtcaccagcagtttaacccaaactgtgaatctgggccccaaccactctgaaccgtttaacatttgtcagcctcttcctcaccagtggtagtttcatggagttggctctcagaagaccaccctagactctggcggtgaacacccatttttcagtgattgctctgagcgtttggcccagaaatcaggctcttgttctgttttctgagcagcaggaggtagggaccattttgatgtcagccttggtagctggacatgttcttgatgcaggcggctgtttgtaacttctgag

SEQ ID NO: 3577 - DNA, 419 bp, Bos taurus
  Clone ID: 40-LIB3058-005-Q1-K1-B8
ttttccttctatttttcatcttccaggaagttatctaagtgatattacaatgccacctggcacacaccctgatttacctgattattgcagctgaggtcacctttaagtcaaacgtaatgactccaggacatatatcaaacaacttctgcacttgtctggtcataccatggttcttaggctaattaaaaagaaaaaaaaaaaaaaaaaaaccttcaaattttatgacacttttgataacctagatatctttgatgtcctctcagaaaaataatctgatgtgtatctggggttgaggaaccatatggagtgtctcaaaacatcagtctgtggcaactccaggacaccatgacaaaattgtaggcataatcatcaccagatttgtcgcccaccctagacattgccatggcaactcaagtact

SEQ ID NO: 3578 - DNA, 384 bp, Bos taurus
  Clone ID: 40-LIB3058-008-Q1-K1-B8
cttgtgtatgacctgtttagccatatgttgcagccttatagtgtctaagctggtcttaaggtaacaaatgatttattgagtcattagtgagaattggagacgtgcttaagagctggtttctagatatgtgagagtatgtgtatgtgtgtatgtgtgtattaaatgtatatagtcacacattttatattgacattctgtagataggtttgaatacagaaacttttgtttgtaatcccaactattgaatcaaaaagtaccaaatagcatatagcaaaactaagattaatggttgcgtctaaaacgtacaatgattcagccatttctagttgtcacttatttcaggtttttctgttttaagttgagtatttatctggagttgaatag

SEQ ID NO: 3579 - DNA, 315 bp, Bos taurus
  Clone ID: 40-LIB3058-009-Q1-K1-B8
acagactacacagaatgcagttgtcttgacctcaggtctgtgtgttctcttggcaagtaatacagtactgttctgatccgctgctattagaatgcattttgaaacgactggagtatgagtcaaagttgtgtttcccccaatgcttggagtggagtagtgattgttaaaagaaaatccagctgagtgataaaaggctgagtgttgaggaaatttctgcagctttttaagcattcatgtttgtgattggagcggagtcccttttgctgtgctttgttttaggtaaaatgctttttgttcacttcaggtaagggggtg

SEQ ID NO: 3580 - DNA, 416 bp, Bos taurus
  Clone ID: 40-LIB3058-011-Q1-K1-B12
attgtgggaaccaatatacgtagtcttctttctacaatgattggtaagaacctgccagttgtagtcttaatctaggggctggcaaacctcagagtttcaatatttatcatgtcttttacttctctgtgcaagagacaataatcaatatttaatctctgtggaccatatagtgtatgtcacagctattcacctttgacatctataatggtctctactacttaattctgctggataagaacagttacctccattagcatacactactgctcagacttctataaaccgaacatatcacgatcatgaagcagtccttaaataggactctcaggagattgttaaatatactgtaccactgtcagagcatggtaattggatgaattgtactcattattcaataatgaataatgatatgtctt

SEQ ID NO: 3581 - DNA, 424 bp, Bos taurus
  Clone ID: 40-LIB3058-012-Q1-K1-B8
cggacgcgtgggcggacgcgtgggtcgcgagcggccgcccttttttttttttttttaatcacgttttccttttaataaggctttttactcaaaagtgtagctttgaaaatctctagcttgttgcgacaaccagagaagccagagcggcctcgcctgaacacagcgcggggccctcacgggcgctccgagccagggtggagggcgaacgcaccgcttcacaatcagagccaacgcggaaattcaggggcaggatacgcatgtcctactttgattccaggaggaaggacaagttcttagcacagtaaaacaaaacacaaagtaaacaaatctttagaaatcactagatatgtgtgtgtgtgtgtgtgtgtgtctgcgtgtttatatcattaggattatcatcaacacttaaaactattaaaaataa

SEQ ID NO: 3582 - DNA, 286 bp, Bos taurus
  Clone ID: 40-LIB3058-014-Q1-K1-B12
gacaaatgattctatgtagctttgataagttgcgcaatcaatttatacaataggatactgtccatacatactatcatactaaaaaacgatagatatgcagacattgcataacatatagcatactaagaataaatacacacatataatgagcagaattcagaccaaatgttaacgatgataaatctgaaagaaaaaatactctaaaaggaaatttatgcatacaggttaaactaaaggtgggagaaatcgggagtacataacacacaaacacttacttatatttttt

SEQ ID NO: 3583 - DNA, 445 bp, Bos taurus
  Clone ID: 40-LIB3058-017-Q1-K1-B8
ctctggcttaaaacaactctcattctcctgaatctgctgatgactgctggtttgcccacattcttgcagggtggccaggggctggctgcctgcgcatctcagcacaatttttgtgtgccagctgcttatatcacgtcggccaaagaaaatgtcacagcaaacccaaagtccaggagtgagaaaatacttcctcttttgtgagaggaattgcaaagtggcatggcaaagggcatgtacacatatgtgtgtgtgcatgtgcacaggtgtgcacatgagggagagggggaaggggagagagtctgctatttcaatttaccacgccatcctctgacatctcgcatcggtgaccttctcacccacagtgttctagccatagagggtcttgtccttgttccttgagcataaccaattccttcttattctgggactatttgtaccacattca

SEQ ID NO: 3584 - DNA, 429 bp, Bos taurus
  Clone ID: 40-LIB3058-018-Q1-K1-B8
agctgatgtcttcggctcaggcccactgccagcagccggggttccccaaggtttgcagaggggtcggcagggagaaccctgtgggatccctgagccctgtgggaaatggtgtctttcccaggcagtcagtctcaatgctctgtgttcccatgagtccaagcggggcctgtaagtggacacaggtctgaccagtttgggcccctccaggccaaagggcatctgcacccacatgaccggggccgtcactagaagccagccggtggtgtgagctccggcagcctgggtacagctggcacatcgtggccgtgagaccggacagggaagtgagtgctttcgcacaagttggaggtgactgcgtcctacacggcgactggagttgactggccctactgccgggaggcgggctgtgctcatggaagccaggatgac

SEQ ID NO: 3585 - DNA, 473 bp, Bos taurus
  unsure (445): Clone ID: 40-LIB3058-022-Q1-K1-B8
ctcacctgatccaagaccttgcactcttctctgagcgagcatttcttcacactcttctctgcagctgggccgtctctgcaccccttggacctctgactcctcctgtcacagcacttgacacatcaccctagggaacaaggcatgtccttgacacctgcccccaggaaggcaggaaccttgtcctttctgtacagcttcagagcagatcactgttactcccttactgaaggagggaaaacccacaccaagtgccctaagactcactatgtcactaacttctttccatccctcgttctgccccacacccagcaggtgtcatctgtctaaagggaaacactgttgacctgtgtacctggttccaaggctcaacatacccctggaaccttcagtgggattttaaaacacaaaaaggccatcccttctcgtgctctctgcagaaccttangtgctaggctgggatggaaatggtcggg

SEQ ID NO: 3586 - DNA, 416 bp, Bos taurus
  Clone ID: 40-LIB3058-024-Q1-K1-B8
gtactactcatcgtccagcgaggaggtggagagcagcgaggacgaggaggaggagagcaacggcgagccgtcagaggggagcagggacgcccctggtgcccgcagcgatggagacacagacagcgtcagcaccatggtggtacacgacttggaagagatagccggtccccagacccgctacggctgtggcaccatggtggtccagcgaaccctctaggaggagcgcagcctgttgcatgccgactgcaacggctacacaaacctgccagacgtggtccagcccagccactcgcccactgagagcagcaaaggtcaaagcccctgcttgaaggatggacgcagtgactaccagtctcgtgggctggtaaaagcccctggcatagagctcattcacgatgtttgtggacctggggatc

SEQ ID NO: 3587 - DNA, 429 bp, Bos taurus
  unsure (397),(413): unsure at all n locations; Clone ID: 40-LIB3058-025-Q1-K1-B8
ggatggagagtcggtgggatctctttacggcctctggactggaggccgagcgcccgcccgcggccgagccccgcgcccggcgtctccgcccggggtgctctccgcagtttcctggcttggaagcctcgggaacatggcgaggcagcggtggtttaacgggaaggacggtgactgttagcctgtgaacgaaagcgagagtgagccgcctcacgctccggaccaagagtgatcttgaacttgtggctgctactagatttttgcccacacctcctcgtatgctgcggcttctccactggagtggggccagggtgaccgtggacttgccgcaagtcagacggctgcaggtcacagcaggtccagtctatccacctttgagcggcggcggcatgtccttccncaccctcgatgacccncgctggcttgaccccc

SEQ ID NO: 3588 - DNA, 60 bp, Bos taurus
  Clone ID: 40-LIB3058-028-Q1-K1-B12
ttagtaccattccttcaaataaagtaatttggtacccaaaaaaaaaaaaaaaagaggggc

SEQ ID NO: 3589 - DNA, 400 bp, Bos taurus
  Clone ID: 40-LIB3058-029-Q1-K1-B8
ggctgaaagagccacacataatataaattgaagcaattcagaatttaggatctggaagtattataattctgttgcgagactgctgggtgtggcggtgtaagaagaccataaaggggcagatgagccaggtgaaagagtttggactttatcttctggttctggtgagccatgagttcaaagttggagaatgatttgactcttttgggaagaacagcagtgcagatgaaaatgaagcaagcaagaaaggaaatgagactaggaacagttatcagaaatgttaattgtccaagaacatgcttgggaagagaatcttccttcagatactgtccgggggttgggagtgaggtgcgaggatgaaaaggacaacaaggcatgttgagaagacggtattgaaagatat

SEQ ID NO: 3590 - DNA, 195 bp, Bos taurus
  Clone ID: 40-LIB3058-030-Q1-K1-B8
cagacgcgtgggcggggatggagagtccgcgggatctctttacggcctctggactggaggcccagcccccggccgcagtctagccccgcgcccggagtatccgcccggggtgctctccgcagtttcctggcttggaagcctcgggaacatggcgaggcagcgggggtgtaacgggaaagacggtgactggtagcc

SEQ ID NO: 3591 - DNA, 260 bp, Bos taurus
  Clone ID: 40-LIB3058-031-Q1-K1-B8
cctccccagatcctgcttcattctacattctgtctttcttatccaaggaactgaggggtacccccaaccctccgcagtccctgccccttcacccccacctcccacgagaacagattgacaccgaaaggcaggggtctgtctaaaccaggggaggggagctgtcaccgatcaccaaggtccctttatctcctcagcctcatcctacttcccacctttacccctatttgctttctgctcaactttgacccctgcttttcctt

SEQ ID NO: 3592 - DNA, 431 bp, Bos taurus
  Clone ID: 40-LIB3058-034-Q1-K1-B8
catgatccttatctgtaaaatcccatggtctagaggatcctagtaggctacagactatggggctgcaaagagttgaacatgacttaacaactaaacaacgtttatggcaattccacatattatgtcacttaaggtagcattttcctctgtgctttataaaattaagaagtgcaatatcatggagaggagaaccacctctttccacatatatataatgcatctatactattactactactctgaattctctatacaaatcttttcaggaaatatgattaatgcccctaattctgaaataaatacatgaagatacaaagaggaacaaataataacattttaataaggactgaaccatcaatctgtcccctcaccattcttttacaaagtaggactttatttttctttaaaaccaccaaatacttcacacgttg

SEQ ID NO: 3593 - DNA, 100 bp, Bos taurus
  Clone ID: 40-LIB3058-037-Q1-K1-B8
aggcaggatcaactgtggcagtgcgctgactacctgagtgaagattacacacgtgtgcagagtaattgaacatcactttttacttgtgggggatggcctg

SEQ ID NO: 3594 - DNA, 381 bp, Bos taurus
  Clone ID: 40-LIB3058-039-Q1-K1-B12
caagcacactggcaaggctgttcgcgatgccaagacaagccctgaggactacgagaagcttggcttccctggtgcccgggatctggccaacatgttccgtttctatgccctgaaacccgaccgcaacatcgaactgaccctgaagctcaaccccaaagccaggaggctggaccagtggctagagcagcacatagaggacttcgcagggcttggaccctgcccacctttcaaccccgtctcggaaggctgggggtgcggtcacagtgaccctctcttgtgttacaagaaaggttattttttaaataaaggcccattgtctcacaaaaacaaaaatgactatagctttttcaataaaatttaaaatccatttaacaactgatt

SEQ ID NO: 3595 - DNA, 436 bp, Bos taurus
  Clone ID: 40-LIB3058-040-Q1-K1-B8
cagaaagcatgtttatgaatgcttacgtgccagagcgaaggggtggtctcggcatctgaggtgctagagctgcagccgtgtggtccaaggttagcaagcatgctgactcggtcagaggcctccctgccgtcactgtcaccgcactcttcctgtcagcatcctcagttggtctgagatggcccaggtctgaggagcaatggccagatcagttcgagtgtttcaggcagcagaaacgaggattgctatggtggtagccgagagtgcggacacatactggatgtgatgttgtcgttttcccggtggcagcagtgctggaagcccctgccctcaagtaccaggtgtgacaataatggcaccgctggcttcggtgtcctgcaggcagagaagcctcatttctccacgtggcagaaagcaagtgagggtgtcaggatgtgag

SEQ ID NO: 3596 - DNA, 382 bp, Bos taurus
  Clone ID: 40-LIB3058-041-Q1-K1-B12
tgggatgtgaaacggttataacttagattacgggtgggttgctccctgtgtgctgtctgaattaacccgttacagactttcttttaatcacctctcctctgaggtcccttgattcctcttctgatttctagtttgagttctggaggggttatcttctccaccccttgccctgtaattttcagcctgggccttggtcatacttctcagaatccaccgatccaagccctcctcttcataggacagttcatgaagacactggggattgagaagctcttctgaggctaacttccgaaagcatggggagggggaggctcgcactccactcactcttaaacgatgttgaaggggccagtcatggccccttacagcagagtatgctgca

SEQ ID NO: 3597 - DNA, 199 bp, Bos taurus
  Clone ID: 40-LIB3058-044-Q1-K1-B8
caggaattattagatgagcgcctatggtggataaagcaatttgccaggtgctgctaaagcgcataggttagtcacacatgtaacgcagaggtaatgatcaaagaatcatctggcaaattactatcgacagcataagatgatgccttttctacaaaaatggcagaatttggaagcaggagagatcacatttgaggtgtct

SEQ ID NO: 3598 - DNA, 443 bp, Bos taurus
  Clone ID: 40-LIB3058-045-Q1-K1-B8
cggacgcgtgggccaagttttacaatcacagttctcaaaatacatacagttctactcgagctttaaaacatgttgagaaatattaacattttttccataattctttaagaacttgaagttctaaatttgttcagtgaacagtggtgttttccttgtggaatcgcagcaggattggtgtgtatgtaacagaagctttaacaaagatgtcagctctgggctccctctatttcctgcgtggctgattattaagcctcatcttgggttgctggcgctccctgagcccgtcttctgtactgggagactgcagtccagagcctgcagagaagaccaccgctacgaaacaaacagaagtcttctttagagtgagtagtacggaaagatgacttcatagcaataccacacaatacttctttaggagcccttatggcaaaagctatagtatg

SEQ ID NO: 3599 - DNA, 180 bp, Bos taurus
  Clone ID: 40-LIB3058-046-Q1-K1-B8
cggagaccccctggctgtccgcgagctaccacgccttcaaggaggggcccaggaaggcgtccagggcgcaagcccgcgcggcggccgcggcggcggtcaccgagccctccaggaagcccaccgggaagccctccgggaagccccccggggacgcctagctgaaggaagagaaggaggcgg

SEQ ID NO: 3600 - DNA, 416 bp, Bos taurus
  Clone ID: 40-LIB3058-047-Q1-K1-B12
cggacgcgtgggtttgcctatgcagtttagctaacatcacagctcacctgttggaaagggctctaaatgtgaccatgctctttggcaggtgggacagactgtcaggccacccaaccacaccaggtgagctgtgatgtttgcctatgcagttaagctaatagttctaaatggaaaatctgtctcataagctgacaaatgctgacattataactgtaaaaagaactgagaatcagacttctgcattcagtgggattctcccgacagaaccacactttgctgggtctctgggatttggggcaggggagcagggggctcagggcaggtcacagctctgccctggagatggccatacccaagcacctgcacctcctgttctgtctgtagaatgaaggttatgatggatgtgtctgatgtgc

SEQ ID NO: 3601 - DNA, 425 bp, Bos taurus
  Clone ID: 40-LIB3058-047-Q1-K1-B8
cacatgcatccccagatgaatgtttagttttctgccagggttacctagctgtgttgcctgactcctaaagtgcttggacactctttgtctgagctttgctcacatggctgtccctacctgagtgttacaggcacacagctgacgagcagactgaagcccaaggaggtcaaggggcaccttgttggagctgccaaggcctcaaccccaacccaggtggctctgcctgcactctgctgctgccttcaccacctggcatttagttctcatcggtactaagagcgtgccgctgtcaggtgcctggctgcagcatgatgagcgtgggcagatcctgattagggcaccgtgggagtgtgccttcctggtcagacgtgacccccttcctatcggcatcctcaggcaccaagaagacctacaccctggtcacg

SEQ ID NO: 3602 - DNA, 326 bp, Bos taurus
  unsure (312): Clone ID: 40-LIB3058-048-Q1-K1-B12
aagagtggctgccctgagggagttccgattgctgcacactgccctgcacagcagctcctgctacagggaggcggtctttaagatgctcagcaataaggaatctctggatcagatcattgtggccaccccaggcctcagcagtgaccccattgctcttggggttctccaggacaaggacctcttctctgtctttgctgaccccaacatgcttgatacgttggtgcctgctcaccctgccctggtcaatgccattgtcctggtcctgcactcggtggcaggcagcaccccaatgccaggggccgacttctcttnccggggcatgccct

SEQ ID NO: 3603 - DNA, 212 bp, Bos taurus
  Clone ID: 40-LIB3058-048-Q1-K1-B8
gagccgtcgccaagagagagagtgaccaggctcagggacacggcctgaggaccccgcgtacgcagccgagcctgaggacgccggaccagacggtcgataggagggagcggagagtgggggcgggaccgagtgagcccgataacagcctagccggcccgaacgacgccgaccaggcccgaagcgacctaccaggccacagccgactacaccag

SEQ ID NO: 3604 - DNA, 205 bp, Bos taurus
  Clone ID: 40-LIB3058-049-Q1-K1-B12
atggaatacatgcatggactcaacggcgtagtaagacctggctcttgcccagcctgtgtctggggagaggtgggcgttcttactcaggccttcccaagtcagaagaccagggtcgggttcaacgaaagaaagatcagatgtaaaacaggcaaaaacaacagctgtcctctactcctgtaaatattatgacagttttttcatagcc

SEQ ID NO: 3605 - DNA, 436 bp, Bos taurus
  Clone ID: 40-LIB3058-050-Q1-K1-B12
accaagatggcggcgcccagtgaggggacttcctttactgcgggggtcgaaaagaattggagtgcggttgttcgctctccagaaggaactccccaaaaagtccggcagctgatagatgagggaattgccccagaagagggaggcgccgaagcgaaggacacatctgccacattccagtcagttaatggatcaccccaagcagaagaacctccgttggaatctacaagcaaagaagccttctttagcagagtggaaacatattcttctctgaaatgggcaggcaagccctctgagctgtctccactggtctgtgcaaaatacggctgggtcacagttgaatgtgatatgctgaagtgctccagctgtcaggctttcctctgtgccactttacaaccagcttttgattttgacagatataaggagcgatgtgctgagc

SEQ ID NO: 3606 - DNA, 328 bp, Bos taurus
  Clone ID: 40-LIB3058-052-Q1-K1-B8
gtttggtccagatcgttaaaggatgtagtagaaggaaagatggcggaagatggggaccttggcggcaggctgaggggagtggaccccacccaggacggctgaaggatcagtagtgggcacaaaacagggccttctgtttgacctcactctgggaggggctcatggggtccgagagcccaccctaccagcttaaggttccacaagaaatgtgttcccacccctcacccctccttggctcaagccgcccttggccaccagacctctggatgaagtctcttgtgccagccatgctgcacacggtcagcagacagcacagggaacccagcgc

SEQ ID NO: 3607 - DNA, 419 bp, Bos taurus
  Clone ID: 40-LIB3058-053-Q1-K1-B8
acaggaatgaacgctgagaaacttgggaaatcatgcccaaagaaaaccaatgtgtatggaggtagaaatacagaactacaaggaagactgtgtctatgggaagtggtttctaaaatgtaggagccaagcttttctaacttaatggaaaatatttcatttgagagcatcgcaatacaaatcagctgtccttttagtgaccttagcgatttcgtgtctgcccggtatggtgaagttttggaaaagctggttgttttaggttacttgcttagctcatggtcagttctcgagaactggggctcttttatatgctgctcgtggcttaaaagaataaacaaaacttctccaaatgtccctccggagcagtttgcatatttctgggaagaatcactggaagaattaattcagagactgataaactt

SEQ ID NO: 3608 - DNA, 121 bp, Bos taurus
  Clone ID: 40-LIB3058-057-Q1-K1-B8
aactaattgctgagggtccatcaacgttttggtctgcccaaacagacttccgggcgtactgagggtatattggtatcaatgcatatggcggtttctgcctaggcatacagcctgatctact

SEQ ID NO: 3609 - DNA, 132 bp, Bos taurus
  Clone ID: 40-LIB3058-058-Q1-K1-B12
acgcgtactcgtgagaacaaggctgtgtctatataatttatctagagacttttttaaccataggtgtggagattgggctttagttttgagagcatgtcaatgtgcacattaattccgatattaaagccctat

SEQ ID NO: 3610 - DNA, 342 bp, Bos taurus
  Clone ID: 41-LIB3058-001-Q1-K1-C2
ctgaaggagtttaatcccaacgagcagaactggcggcagcacagggaagcctatgaagaggacgatgacgggccgcgggctggagtgcagtgccagacggcatgactcggccccgtacagtgtggcctggcgggactagcacatcatgaatgtaaagttggcacaatgaaaaatggcatcgctttaacggcctcgtgtttggggagtcctgtgtatgtgttcagcattctcaactgctgagtgtcttttggtttttcttttgtttttcttttggttgtaacttaagttatagcttaatttatatttaaatgttttaagtgtaaatcactagtctgcatatgg

SEQ ID NO: 3611 - DNA, 219 bp, Bos taurus
  Clone ID: 41-LIB3058-002-Q1-K1-C10
ggttcgatcgcaagcgccgtcggctgctcgaccaccagttgcggctcggcgatcgcgacggctttgcgctgctcggctacggcgcgccgtccgacgcgcagatgttcatcaagggctggctgttctatccgtacggcgcgccgttgccgccggtggccgccgaaatcgcgccggatcacccgcgcggtttctggctgacgcacgcgcagtggccggcgt

SEQ ID NO: 3612 - DNA, 91 bp, Bos taurus
  Clone ID: 41-LIB3058-004-Q1-K1-C10
ccgacacaccccagaggacttagggcccctgctctacacttgcagcacccaacctgggaatgggctgatttgaaataaaagggaagacttt

SEQ ID NO: 3613 - DNA, 409 bp, Bos taurus
  Clone ID: 41-LIB3058-005-Q1-K1-C2
cggacgcgtgggtgcaaacactcatttttgaacaagctcgtggtggaggatttgggttgtgtgagtgtgtgtgagtgagtggagcagactttcttggaaactggaggaaggagatgaggaggcttaaggaaatattgctgatgggctgtggttgatgaaacatggtgggctgactggccggccccagctctcgtcctgggttctctggtgctgggggtggggtgggatgtggggctctccatggcctgttcagtagctgcggggacagaacagaagataaaaacgaggtgccctcgagcagcagagaggccatggctccttctgtgggtcgcataccttgcccagcactgttcaacaccagcccaagcgattctgccatgaaatattccagccccagggacccagcttg

SEQ ID NO: 3614 - DNA, 261 bp, Bos taurus
  Clone ID: 41-LIB3058-006-Q1-K1-C10
gttctagatcgcgagcgcccgcccttttttgtgttatggtagtggcaagacagttgcattggcctgaatgtaagccatagataatgtgcttttccatgtgttgcttttctccttcgtccactctttatgctcttgattccaaaattacagttgtttttccctgtcagactcatttaaaaaacaactgccaccctcatatcgctaagacagagccagatatcacccacgatatgagattataagctgccttcactaactcta

SEQ ID NO: 3615 - DNA, 397 bp, Bos taurus
  Clone ID: 41-LIB3058-007-Q1-K1-C2
cggacgcgtggggatcgcgagcggccgcccttttttttttttttttttttttttttttgtttttgttttttttttaatcacgttttccttttaataaggctttttactcaaaagtgtagctttgaaaatctctagcttgttgcgacaaccagagaagccagagcggcctcgcctgaacacagcgcggggccctcacgggcgctccgagccagggtggagggcgaacgcaccgtttcacaatcagagccaacgcggaaattcaggggcaggatacgcatgtcctactttgattccaggaggaaggacaagttcttagcacagttaaacaaaacacaaagttaacaaatctttagaaatcactagatatgtgtgtgtgtgtgtgtgtgtgtctgcttgt

SEQ ID NO: 3616 - DNA, 410 bp, Bos taurus
  Clone ID: 41-LIB3058-008-Q1-K1-C2
ggcagtctgctcgcttggcctctggtctgcagaggaggaacactgaaagttaggaactgtcaagttagaaagaagactgagtttggcatttgtaaggctgggacatgcacaacccaaagagagaagcctcaaccatgtgtgttttgcagagtgaggataaacttgtctgtatgggcatcagagcggggcttgggctgcatggtttggagatgcagaggatagaagtgaacactcaacagcaggcaggctttctttgcctttctcttgagtttctagccctacacctgggtgctgcccacgtctaggagatggcaggggtagaaagaggaggaaggagggactgcaagatgaagaaggcagaggatggacaggcaagttgcatttgaaccgagctgtaagcacagcaccca

SEQ ID NO: 3617 - DNA, 432 bp, Bos taurus
  Clone ID: 41-LIB3058-009-Q1-K1-C2
tagatcgcgagcggccgccctttttttttttttttttttttttttttttgttttactgtttaactttattaaaaaagaaaaaaaattaagagaataaaatgttttgaccctttctggcactttgctctggcagctgctttttgtcactccagccagcggggccagacctgggcccccagcacggagtggatgcccaggtggacctcaggctcagtcagccgtcccacgaggggtgcgggtgccccctcaaaaatctgtttagcacgtgcatgctaagcaggccctggagatgctgttgggcccagcctgatgccagtcatggggcagtgagttcagaacacatcttatggtaggggccatagaaatcactagaagctgcatgtgtccaaagtgggtgccaggtgcctggctgggctaactcagatttataca

SEQ ID NO: 3618 - DNA, 331 bp, Bos taurus
  Clone ID: 41-LIB3058-010-Q1-K1-C10
gttctagatcgcgagcggccgcccttttttttttttctgagaactgcctgtgttttctttgccaattttcatttgtgtttatctctcttactgatttacaacagatttcatgtatattaagaaagttagctgtttgtctggcatatgctataaatattttctccctgttcatcttttgatgagtatgttgatggtaatttcttgccataatttctatgtggtcctgtttatcagtgtttttatttatgacctccaggtcgtaagtcttgaatataaaatacttttcccacttcaaaaagtaatttaaaaaaaaaaaaatttataagttaat

SEQ ID NO: 3619 - DNA, 192 bp, Bos taurus
  Clone ID: 41-LIB3058-010-Q1-K1-C2
acgcagatcatgtgaattagatgacagattttgttctttattgacagctacttttattgggaccgggctgaatataagcggacttatgacacaaaccttaataatgctgatatttaggatgcatggaacattgtccttatgtacatgcacctattcaaagacgttctattcttatatcagtcagtatgcatg

SEQ ID NO: 3620 - DNA, 262 bp, Bos taurus
  Clone ID: 41-LIB3058-011-Q1-K1-C2
tcgcttcgtgcctctgaaggattaatgcgacaccatgccagctttggtgagaggagccccagcccaaagccccttacccttgcaatctgggataaggagggagagtctgggggagtcaccacggacaacttccacaacctcttgtcccttagctacagacacccagattagggagcagggatacatgccttctccgcctaacaccaagatgaaggaaagggatcatttaggggtctgagtccctaagagatattaggacatc

SEQ ID NO: 3621 - DNA, 312 bp, Bos taurus
  Clone ID: 41-LIB3058-015-Q1-K1-C2
acggagcctggagggctacagtccgtggggccgcaaagagtcggacaggactgagcaaccaacactttcacttttcaccccctgaaaagactgcacttggagaaccactgttggagaataattacatttttgtgttggtttctgctgtacaacattgtgaatcggctccgcacctgaaccttacgcttcccttcaaggtctaggcacagagacctcgtcttttcctgctggaatagtctgccaattgccagatggcgtgggatgtctatcctcaacctctgaaggggccgagaacactctaggagctgctaa

SEQ ID NO: 3622 - DNA, 377 bp, Bos taurus
  Clone ID: 41-LIB3058-016-Q1-K1-C2
caggaaacagaaactttgtttttttagttttgttttagagatagatttgggcatgggacagttggagccatgtatactttcttgtacatagatggaaacagtgtttggataggaaagaggaagctgtttacagttaactttatttcatggatttttacaaaataatgtatgactcactttttacttgtacgaaccattgattttgaaaatttgcatttccattcttttagtactagttaaaaataaatgcttaacatcagctgtttactatcactggggaagaagttaacttgaaatatttactgataaatagccttttcttaaagtgtgacttttctgccttgtctgcatactatgtgacatggtctatttgcact

SEQ ID NO: 3623 - DNA, 363 bp, Bos taurus
  Clone ID: 41-LIB3058-017-Q1-K1-C2
acgcggacgcgtgggaatactgataacgctatgatatcaaggctagaatggatacattacaattcagggactttcaaaccgatgcattctggaaaatatacagattatataaccacactgttaatgacactgacggatatattcgcttgaacttccaaaaaagtcctgctagccttgccgaatatgtgatatgactgaatgctgacactttagcacccactgatagaagccatgtcagtatacctatgacatttgacatactgcattagaattaaactacacctgatgtattatcatacttcaagctactttcactaggactgtatatatagatagagacatgtatatcgcatcttcttcgac

SEQ ID NO: 3624 - DNA, 459 bp, Bos taurus
  Clone ID: 41-LIB3058-018-Q1-K1-C2
cttgtgtctgccttcactcagcaagtctgtagggcctctcttaagtgcccagctctgtgcgtggcactagggatctagatgtgagagaaacttgttcttggccccattaagctcacagaggtgaggagagaattgatagatgttgatgcctgttgaaattatgttcattacccattttcagttcataaccagttgtattaacctttacttacctgggtttaccctcccctgttagatggttgggtctggtaccctccatgacctgtgcttggccattgttgacgttggagatcacagatggcaaagatagggtctcatagagccaaacagatgaggaattaatcttccaagaagcctcatttgctgctgaccttgaggtcagagcccaggccaaacaagcacagcccagcgaggtccctctaaggtttggccctggatttgtctccttacagcaatgtt

SEQ ID NO: 3625 - DNA, 234 bp, Bos taurus
  Clone ID: 41-LIB3058-020-Q1-K1-C2
gctatatacactttcactgctttacccgggtaattgaatgctattgttggaagtcactgggacctatttcaactgtgcttctatattgctaatacagctctggtctcattggttaatattaccatggactaagtcgtgcttataacctttttttaacacagaattatgaaatttaatatactctccctagatcttttgaagaatggtggcaaattaggaatttaacatttatct

SEQ ID NO: 3626 - DNA, 458 bp, Bos taurus
  Clone ID: 41-LIB3058-021-Q1-K1-C10
aatttttatgaaactcaaagcaagatcttatgattggaaaaggatctattcctctttactgaactgccttccagctgttggcaggcagttcagtaaagagagaggaagtatgtatgtattgggagtaagttccacttctgaaacacccatcaaccagagtagtagagagctgaaacccttccccaaaagaatctttaagtcagtctaacatttacccctgttttgtcttttctttaattttccgaaaggaagctaatggagggttggtatacgtgaaagcagtagatggatggtaggaaagagggaatgggggagtgttaagagaaagccagaaaaacctacagtggtggttctcaaaatgtgatcttcagatcagcagcatcacctgaaaaacagcttgaaatgtacgttttagacctactttagaccttctgaattggaaattgaggttggagccc

SEQ ID NO: 3627 - DNA, 444 bp, Bos taurus
  Clone ID: 41-LIB3058-022-Q1-K1-C2
cttgtgtccagggcatccctagaaaatcagtctgccagtcttgacctggatgtgtggctctatcccacgtgggggtcactccgttgaccttgcggggggtgggtgagtgttgggcttattccggaggcagacaaagtgagctccgaccccatttaaggagactggagaacagggatggtcgtggacttgatgagccactgacatggggcctcctgactgtcctgtgtactcaggtgagctgcccagatggcctgcagtgtgatggccgacaggagggacagctgcccatgaccagtatccatccaccccaggcactcatggcttttaagatatcaccatctgaaagcctgctgtcattgttctggggtgtagacggcagcatatcgaagtccatgatcccctttcacttggtcagatgctgtgtctcccctgttacttcctttt

SEQ ID NO: 3628 - DNA, 397 bp, Bos taurus
  Clone ID: 41-LIB3058-023-Q1-K1-C10
cagactcgtgggtctgtgtacggctaaaccaagattcagcatcttcaatccccaatggatatctgtttagcagggcatgccgcttttcccgtaatttcgtaaggaagccggtcccccgacttgtacctgaatcgcagtattggtctgactattgctgccttaccttcagtattgtatcccataactcacctctttagagcttacgttgtggtctttcctgggctgagtctttggcgtccacagcgtggggcgcatggtcacgtgacgccagggatccagacccttgctgcagcctatgagtacgagcctgagctggtctgagcaacttgacgcgcttctgaatgctacggaccgaaatgcgatcaggatgaagcaagggctgtatccacttggagtc

SEQ ID NO: 3629 - DNA, 333 bp, Bos taurus
  Clone ID: 41-LIB3058-025-Q1-K1-C2
ggatggagagtcgctgggatctctttacggcctctggactggaagccgagcgctcgccggcggccgagccccgagcccggcgtctccacccggggtgctctccgcagtttcctggcttggaagcctcgggaacatggcgaggcagcggtggtttaacgggaaggacggtgactgttagcctgtgaacgaaagctagagtgagccgtctcacgctccggaccaagagtgatcttgaacttgtggctgctactagatttttgcccacacctcctcgtatgctgcctcttctacactggagtgtgagccgcgtgaccgtggacttgccggaagtca

SEQ ID NO: 3630 - DNA, 244 bp, Bos taurus
  Clone ID: 41-LIB3058-028-Q1-K1-C2
gttctagatcgcgagcggccgccctttttttttttttatttttttttatttattttggttttgttttaattaagggttgttttgtttttaaatatatttttaaaatattaaaaattcccttccttttataaaattccttaagagttactattttttatttttttataaaaaaaacaaaccccacctttttccttaaaaaaaaaaataaaaaaatggcttcaactttaaaacatccaaactaacc

SEQ ID NO: 3631 - DNA, 248 bp, Bos taurus
  Clone ID: 41-LIB3058-031-Q1-K1-C2
aaatagctcaagtgacagaaatatgcctcatgatgtctgttcttcaaagactgaacttagcgattttagacagaggctaagagtcctcatcagtaacaagacagagaggacctcattctggattgacatgaaccactgtaaagctggttcatgtcatactggaaagctgtagaataccatgaaccaagatttggaatgatgagtcatgtagacacagggaaatgatagagtatggggactcacgtttg

SEQ ID NO: 3632 - DNA, 428 bp, Bos taurus
  unsure (31): Clone ID: 41-LIB3058-035-Q1-K1-C10
tagggatgcaccttaccgcgcagcacattgngttagatttgtgtttcattctaagagcgatgggacatcattgtagagtttcaggcagaggagtaaaataataaaagtaacaaataccttcggttgctttgtaacgcctggattggaaggaacctgggctgagaggagggatgctgctagaatgctccctgatggataggaaggaggtaacaggggttcctattcagatgatggcagcaaagatgaagagaagtgtatccaaaatgctttgaaagtagaagcaagagttaacaatttttttttgtaatttatttcatgacaaaacacctgaactgagttgaagctgtttatagtctttttctaaggcagtgtcagttttcatatattttgctgtaaaaatattgtgatcgattacaggatattgacct

SEQ ID NO: 3633 - DNA, 443 bp, Bos taurus
  Clone ID: 41-LIB3058-045-Q1-K1-C2
ctgagaatgggctagtgaggagactcatcaccgtgcccaacctttcccggatgatctgggtcaagacacccaagccaggtaaccctagctctgaggaaccaagcataaagggggcccctggttgcaagcaggagctgcctgagcctgtggcctcaggtgggaagccacggaagggcaagagacagggtaatcaggccaagaagagtgaggtgagcccagcttcccagtccccagcctgccttgagactcccagtgccaagggccagacccctagccccaagcagccaagcaaggccccagagcctcccagagtggacagctgtgctgaagctggagaagggagccaggggactcgaccaggaccaggctgggctgacagccccaaagctgacaaggagaagggcaactcctggcgaaactggccaggtgaagccaatgcacgg

SEQ ID NO: 3634 - DNA, 418 bp, Bos taurus
  Clone ID: 41-LIB3058-051-Q1-K1-C2
taaaattctaaaataactctcaaactgtgtagattaacatcttgatttatattaaatcttcaacagaatagtgaaagtaactttgatttacaaggtcccagtatttttctcctatatatgacagttgtacatactcaagtgaggataataaaaccaactgaactgtgaatttaggatagaactggggtaattttgtacagcaagtttgtgtgccagttacagaacatggtattaaactttaaaaatacccttcccctccgcaccgtccaacacacatagacaacttacccatgtatatagataggtaggtaatggctgaatggatcagtactttagccaaagagtgttcctcagattgagtaaagcttaatttgggggttataattcttaagctaagactatagtcttcgtaactgtg

SEQ ID NO: 3635 - DNA, 425 bp, Bos taurus
  Clone ID: 41-LIB3058-053-Q1-K1-C2
ctccttcatgtcaagagagcgtgacctgctggggaaggtgcagttggacctcgctgagatagacctttcccagggtgcggcccagtggtatgacctcatggatgacaaggacaagggcagctcctaggagccagggatttctgcctgactgctctgtctccttgcctcacctcttgctgcatcaccgcctccacgcgatgagcctaaagcttggggcccgagggcagagcctgcaccgctcagccctcacccttcccggtcctgtgctagggcctttgcgcaaccaaagagcaggaccgtacgttaccctctactgcacggcctttatccttccgggctcctggggcagggacgtgagctggctatttgctgctctgcccacacattctcctttctgcccagctcctcaaggccttctgtgtctg

SEQ ID NO: 3636 - DNA, 372 bp, Bos taurus
  Clone ID: 41-LIB3058-057-Q1-K1-C10
caaaggtcataaagtgtcatttaaaaattttcagcttttgtttatgtggattatggcggggttcctttagctagttagaaattatggcagaaattttaaacatctaagcatattttcggatagctgtcagcagtgatgtccccacacatcatgtagctccgtgaagactgccttctacacataaggggagaagagcaagggggaaaagcagaacagtgtcttagtataataatgaaataattttgactttataaagacttcactgaaaaacttggggaagggaatccccttatactttgataattgcttcttttacattgctacgaatacttgggtcttgtgaagttataattcacagatgatggctgtgta

SEQ ID NO: 3637 - DNA, 95 bp, Bos taurus
  Clone ID: 42-LIB3058-002-Q1-K1-C6
tcgaccacgcgtgcgtaccatataaaacatacaacaacaatacaaaaaaaaaagagaaaactaaaataaaaaaaaatgaacaaaaaaaaacaacg

SEQ ID NO: 3638 - DNA, 424 bp, Bos taurus
  Clone ID: 42-LIB3058-003-Q1-K1-C10
gtcacctttgaaataatgcagaatagtgatctctttccatgagggtagctgaactcaagtacagataagttaatggctacaattttagagtatgcactgaagggaagttgttttccacaaactatttttcctcatggcccttgataatcactataatgttattttgatatgaggaataataaccgttcttctaagtagtgagatggatgctagctgggcattttcagattgaagctatctttaagaaatcacgtttatgggtttggatttcaataaactgcattgctgatttctcatgaagagtagagaacatgaaatgccaactcacatggacacttagagcctgattatcacttagcatattgaaagtgttttcctacccctaagtgtcatagctggtgaagagaagatgaggtgttttaat

SEQ ID NO: 3639 - DNA, 275 bp, Bos taurus
  Clone ID: 42-LIB3058-003-Q1-K1-C6
gtaaaatgtatgttctcgttgtctgtgtttattggaatatttagcgtattatatgccatagacaacgaatagtccatgaaacaagtctactgagatatactgctaatgtcagcgtcatctgaccagaaactgagagacttacacggtctgacaacagactgcttataggatgcacttccaagaaccatggctggcattgcagaagaagaagcatgaattgatctataagccaaaaatattgcatgaggtcatggatattgacgtttattctgtat

SEQ ID NO: 3640 - DNA, 445 bp, Bos taurus
  Clone ID: 42-LIB3058-005-Q1-K1-C6
gcgagcggccgcccttttttttttttttttttttttttttttttttttttaatggtaaacccatttatttctcaaaacttagtttgccgcttgatattcccgtagagatgggaacaccacaccacgtccttgaggcccaaccgcagacctgtccaagcactgtccacaggcagctcagtccatcagaggttcgtcagaggtccaagagaaacctcctaacctgggccaggtattttggcttcaaatagtcacccagttcctccttgctggcccacacgtgacggcccttttccacggccggggaaaagtctccggttagcagcagggctttgaagaagaagatcttggccccgaggctgccctgcgaccgcactgccttggggaacttgaacttgtagtggccgtagggcgcattttccaggaacttggcttacaggttgttttt

SEQ ID NO: 3641 - DNA, 372 bp, Bos taurus
  Clone ID: 42-LIB3058-008-Q1-K1-C10
gtgccacttcttgagccctttcctttttgtatgtcctcctctatccgttgaggtctattcctttatcccagtctccttaccctgtaggtcattcctctggaaaaccagacagataaagacctcaggtggacaggccattcatttgccttctaagaccttcattgccttggctttctgtcttctgcgtgccttttactctcccttactaccctttactgagggtctggatccaggataaagatccatatagttccgtggcacagcacacgcatttgtgacaagagccatgccactgacccaggatggcccatcacttgtggggactgaccaagaatagcccctagcttctgtactccccccagtgacccaaaa

SEQ ID NO: 3642 - DNA, 285 bp, Bos taurus
  Clone ID: 42-LIB3058-009-Q1-K1-C6
ctgactcgtgatgactactaccagtttctataaatatgatcggataacatctcctgagtagaaacttgtctggtacagacatatcataatccgtactgacattatttacgctgtatgtaaccttggcacggatgcctcagctaccgctcactacgcaagaacgacttttgaggatgctgaggtgtttcatcagagtcacatcattatgccctaattactctccagaatccttgcttactttaagaacggttctatatttatcactctcgtgatctctattacccc

SEQ ID NO: 3643 - DNA, 236 bp, Bos taurus
  Clone ID: 42-LIB3058-011-Q1-K1-C10
gctgcatggtatgaggaccaacttgcattacctcacggacgtggactgagacgtgcgctacgacctctatggcacgtactggatgcatatggtgaccaccatgctgactgatgtcattcacagggtgcacaccgtgctcatcctgctgctgacaacgcccgacgctgtgactgttatggttattccgatgctcgaggactagctagagactatgctgctagatgctggactagatg

SEQ ID NO: 3644 - DNA, 417 bp, Bos taurus
  Clone ID: 42-LIB3058-016-Q1-K1-C10
cgcgagcggccgccctttttttttttttttttttttttttttttttttaaaggaatagactttattaacctagctttcaaacactagaggctaaaattcagctgaactctaacaatctatttacagagtgctgtccacagaccaggtggggttgggccactcttcacccatgacacagaggacgtttatatacacctgaccaaaccctcagtgacaggataccaggcaggagggcagtaggtcaacagagagctggacagacagacacagacagaggccgagatggtcgagcggcccgcgggctggctcagcgcttcttcaggctgtaggccaggctgccagggaccctggggccttgcaggggtggcgagttccacacggcggagctagtgcgcttatggtagcggggcttgctct

SEQ ID NO: 3645 - DNA, 444 bp, Bos taurus
  Clone ID: 42-LIB3058-017-Q1-K1-C10
tacgcgtacatcaagaatttgttgtgcgaaaataggacaggctctcacatacacttggtgtaagagctgagactctaccagcataaggaactcctgcagctgggcttatcacctccaagtaggaagctagcatacaggatcctcttgcgggaaaaccaaactgtgccaatgatgctcaacaacttgcgctccctaaagaaagagttcagccagcctgtcaagtgctctaccaggaaccttcaatgagtgctcccatctggctcacactgcctcactctaaatttattaattgctgtcctggctataaatgagcaactatctgtacttgcataatctgtcaagaattatactcccattaactaatatggtgatctatggccttcaaaaagatggtgcaagaagctacgactcttaatactcaggtgcttcttctcttgaccctga

SEQ ID NO: 3646 - DNA, 454 bp, Bos taurus
  Clone ID: 42-LIB3058-017-Q1-K1-C6
gcgacatcatcacatctgctcttcagatcccaccaaagagtctcctgcacccgaaggggtgtctcctggacccttccatcctcggtgcccccagcctttcctccccgccacgctcatccccacccccggctgccagcgcctgcccctagtctccaggcctggttttcttgccctctgcctcatgccccaccctgctcccctcccaccacctactcttagaggccttctctgaagaccccctagaagggggccacccctttagtcttccactctgcctgggggagtgcccttctcctagcctcatccctgaggactggtgaggctggaggagggatggtcaccccctcttctccgacagaggtttccggggtccctagactcctgaagacaagcagaggcgttagctggagttgcagacagtgccacttgtgttaggagaggggtgaacagggat

SEQ ID NO: 3647 - DNA, 324 bp, Bos taurus
  Clone ID: 42-LIB3058-020-Q1-K1-C6
aaaatatccactttcacttttttttttgggtaattgaatgctatttttggaagtcactatgacctatttcaactgtgcttttatatttttaatacaactctgttttcatttgttaatattaccatgaaataggttggtatataacctctttttaacaaagaattaggaaatctaatatcctctcccaagatcatttgaagaatggtggcaaattaggaattaaacatttatctaaattcagaacctggtatttatttcagtaagcctaacagcttttaagtaataacattaatcaagaagctatttcatactttttaaggtatg

SEQ ID NO: 3648 - DNA, 329 bp, Bos taurus
  Clone ID: 42-LIB3058-022-Q1-K1-C10
ccgctcaaaggtgggattttcaaggccttttctttttttttaattcctcacacccagttaatatctctcgcttcctttgatcacgattgaacgggtcaagttcttaatcacttcacatccacctacctacccctgccctcttctttcttccatcactgaagctttctagtgcattacttcggtacgcttcccggcatcataaccactgctttcatctaatcagctttctttgtcccatatgcatagctcttcctacagatagcccagtcattgtcaatgcattaggtggactttctcagacttgctactgagtctgctacacgcctgtt

SEQ ID NO: 3649 - DNA, 357 bp, Bos taurus
  Clone ID: 42-LIB3058-023-Q1-K1-C6
gccgcagggaggcggaaggagccgagaaccagccagagctgcgtaggtgagcgggagccttggcggccatggcggtctcggagcctgggtaccggagctggtccttgtggcccgaggtgccatccgccaccttcttcaccgcgctgctctcgctgctggtatccgggccccgtctattcctgctgcagcagcccctggcgccctcgggtctctcgctgcggtccgaggccctgcgcaactggcaaggttacaggctggtgacctacatctttgtctacgagaatcccgtctccttgctctgcggtgccatcgtcatctggcgctttgctggcaattttgagagaaccgtgggcaccg

SEQ ID NO: 3650 - DNA, 81 bp, Bos taurus
  Clone ID: 42-LIB3058-024-Q1-K1-C6
gttctagatcgggagcggactacctcttcttcttttaagggatccatactctgtacaggtattcaagtcttggaattggat

SEQ ID NO: 3651 - DNA, 396 bp, Bos taurus
  Clone ID: 42-LIB3058-028-Q1-K1-C10
ctgccttttactagaggtctttgctcacaacagggtgtgttcgtttggtcatggggcgggtgattttaggtctggcttagggaatattttaaaactttatatgaatggaaagttcttttaagaattttctttttaactcctggcagagtaaacaggcgtttttaaagctcgccactgtcagagccgagcagagccctgtgctcatggaggggccccaagctccagggttgcagtgaaagacactcctggcccctcagcagcccaattttctgcagcaggaaacacgcttggaaagacatgccatgggccactcagtctggccgggggcagcgcattcctgcgagagctgccctccgtccaaacaagaggtgcacaccgacctcgggccctttgctc

SEQ ID NO: 3652 - DNA, 191 bp, Bos taurus
  Clone ID: 42-LIB3058-035-Q1-K1-C6
cggatggcgcacgctacggctgcatcgagcaagaggcaacggaccagggcacgaacaggccaccagccaggcaaacgagaccaggaaggaccgacggcccagaacgacagcaccaacaggagaggctaacacagaagcgccactgtcacacctgagcagcgcccgaccagagcccagggaccaccgaggac

SEQ ID NO: 3653 - DNA, 268 bp, Bos taurus
  Clone ID: 42-LIB3058-036-Q1-K1-C6
ttgttattgcttggctgtaatttttattaagataaattatattgcttttgtgtatgtgtttttgtggtgtatgttcagaagccaagcacccttggaatttgctagctttgcagaactctacatgtgtactcattattactaattatgtaaaaaaattttttcagtactgttcaacatttgacttttttacatgtttgaaatgttgctgaatttttgtgctgtttgccagacttatacagtaaataaatgaagtactgtgttgattttc

SEQ ID NO: 3654 - DNA, 296 bp, Bos taurus
  Clone ID: 42-LIB3058-042-Q1-K1-C6
cgggcctgtcacatgctgcatacacaatggatagagtgaatgctacgtgtagcagaaggtcattatatggcacactgaagtcagcttgcacatgattacatacattaccacaagcaaactaatgacaagacgctcatttaatatatgtctacctgacactacaatagcgcttgataaactacattatactgaacttgtaaaatgtcggcacagagctatgcacatactggacgctcgacacatgtaaatggacatgtttgcaatactagatttaattacatctgactactgttaca

SEQ ID NO: 3655 - DNA, 399 bp, Bos taurus
  Clone ID: 42-LIB3058-044-Q1-K1-C6
ctctaattttttcttttatttataatatatattatgtatatgaaatgtatatctatagtatgtctggagagacaggactacacactgaaatggataaaagtagtttgtagaaaatcgtaaggtactggactttcttacaaagcagctcgggcgatctctcagaacacaagcagatgaaagagatggtcttgcctgagaatgaggttgcaaatccctctctgcagcaggggttacagaatgccgttctttataaccaaagaacttagctaagactgaatgttattgctgtccactcttggtttatgtgtacatacgtgtttgactgcaagttcggtgccatatgccctgtggctcccaggccacgttctgccgttctctgtcgtgttttctaagcacact

SEQ ID NO: 3656 - DNA, 442 bp, Bos taurus
  Clone ID: 42-LIB3058-045-Q1-K1-C6
ctggggctcatgctcttctaccgcctgtctttcattctacacgacacgagcaagtccggtcagaagacgatcgccttttctctggggtacggctgccctctggtcatctccatcatcacagtgggggccacccagccccgggaggtctacatgaggaagaacgcctgctggctcaactgggaggacaccaaagccctgctggccttcgtcatcccggccctgatcatcgtggtggtaaacatgaccatcacggtcgtggtcatcaccaagatcctgaggccttccgtcggggacaagccgagcaagcaggagaagagcagcctgttccaggtcgccaagagcattggggtcctcacgccgatcttggggctcacctggggtttcgggctggccaccgtgttccaggggagcaacgctgtgttccacattgtgttcaccctcc

SEQ ID NO: 3657 - DNA, 110 bp, Bos taurus
  Clone ID: 42-LIB3058-046-Q1-K1-C6
tgcggaacaagaggttgtgagatttgtttatggaacctaccgatctttccttgagggggatctaagaagctattggcaatgcaacatcagagtgtaaagagaatattatg

SEQ ID NO: 3658 - DNA, 434 bp, Bos taurus
  Clone ID: 42-LIB3058-049-Q1-K1-C6
acagattctcctttccttctcccttttatgtcctctggattataggcacagatcaaaaatcatagtaacaaacgctaggaagactggcaaaaatccttccctaaacctttggactgtccttcaaagggggaatccagcagtggaatttgaagtttagagccatactccttccatagtgccaaagttactgagctgctgctattcttcttacctgcttcactgaagtggtgtaactggcaatggcctgattcaagaaacttctttaagaaacctgtggacttactcccaaagccatagtgaagacctgaggcatgcgcctcagtgctcaaagtatgagcttttttttttttttcaattccttattctgactgcagaaacttggatctgaactaaaaaattatccaattttgctatgttttgttttcagaaaactc

SEQ ID NO: 3659 - DNA, 443 bp, Bos taurus
  Clone ID: 42-LIB3058-050-Q1-K1-C10
gtaaagaatacgtaggtatacataattggtgagacaaatattcactttatttatcttttatatattattttttaatttggtaaatactatccagttttgtagttgtccttgttgatttgtgtgatgttaaagtattagtagtaactgccaggaaactgtcattagggagggtgtagtcggttgctgtttggactgggagggatgattgaaatttagtgctagaaacaaatgttagtggctgcacagtttatcatttgtcagacagaaggtagctatacagctgccctgttaagtcagatcaaaaaagttcagaggaagattagtaagtatttatcaattaaaaaaaaaacattttatctttctaacatcttaacatgtcctcccctttaggaggaagaacgtgcaaaacgtgaagagctggagcgaatactagaagagaataa

SEQ ID NO: 3660 - DNA, 159 bp, Bos taurus
  Clone ID: 42-LIB3058-051-Q1-K1-C6
cggacgcgtggagtgattatgaagtggctccccctgagtaccatcggaaagctgtgtgaggcgcgtgtacccacccatgtttgatctctgtaaacacctttttgtttcttagtccttctcttgtacaaacaatgtactttggaaatgttcgtgtataac

SEQ ID NO: 3661 - DNA, 221 bp, Bos taurus
  Clone ID: 42-LIB3058-053-Q1-K1-C6
cttaaaggttacatgacactgttttggtgtacattaatttcccaacaacaaatggtaaggctagcgctggtccttaaatatcaaggaacaaagaagtagctgattgaagcgtcatttgacttccctggtggctcatacagtaaagcgtctgtctactgtataagatacctgggttcgttccctgtgttgatgaagattttcaggatattgaaataacatct

SEQ ID NO: 3662 - DNA, 266 bp, Bos taurus
  Clone ID: 42-LIB3058-057-Q1-K1-C6
tttaattttctcctctaattaaaatgtgtaatattttcagtgtcatatttaactacttagaatatgatttccacctcgatgttttaatattctaggcatctggtgtaatgatattttagaaactgtttggaatttaaggaaataacttgtattactaatttgtataatctctacctgtgcaatggaatataaatatcacaaagttgtttgactaaaggactgtgtgttgtttttcccatataataaaaccaaagagtaatttggtt

SEQ ID NO: 3663 - DNA, 411 bp, Bos taurus
  Clone ID: 43-LIB3058-003-Q1-K1-C4
gctgtacacacagccgtgcaatctgcacttattccaaacactgtcaaggcctaagtcgaaagatgctgtcagacacttgacccgatagagcttattcacttcagcccttggtttctaaaatctattcaaagttacctgtgccaaatcgatcgtaatccatgaagatgcacatcaactgctaacagccctacacgaacttacaagtctggccgtattccgtgacctatgctgcaacgatgcgaacctggcactttgtcctgaacatttgcaccaaaacctgaaatacctgcagacaataatcatcctgtaacacgtatatgactggagagctgatgctcaagtgaatcatatctctctgccgcgcctgatggatctgaactggaggacatacattaaaacctactcagacag

SEQ ID NO: 3664 - DNA, 463 bp, Bos taurus
  unsure (13): Clone ID: 43-LIB3058-005-Q1-K1-C4
cgacccacgcgtncgcggacgcgtgggctccactttcattttccactagaaatgaaaagcaattttccagacagaatctgttgctattttaaaggttattgtgggaaactgaactaaaggagttagcatctttatttttgtatcaaagatgaagattattttgaaattattaagatttttacacaactctgaagtctgttgcttttgtaaacaagttgtttaatcttagggatcccccacaaccaccactaacctacttaacaaagtcaatgtgagtctaccaagctttgttctggaaacaaacacctgattaaactcctgagcatggcgtaaaaatttttgtaaaaaatgcatttaagggttcttttccttcccttcactgtcattaatgttaaaaagaaaagccactgtcttgttgaactaaatagcttaactgtagaaataagaaagagcacactttgat

SEQ ID NO: 3665 - DNA, 146 bp, Bos taurus
  Clone ID: 43-LIB3058-008-Q1-K1-C4
tttaggaacgtgcaggataactgatgcatacgcccagtatacactgatttcaatatggacctcggatcataatggacttatcaacatgagagggcctcagcctgattctgcactgtagcatgctgatctctgacttactaactcac

SEQ ID NO: 3666 - DNA, 430 bp, Bos taurus
  Clone ID: 43-LIB3058-009-Q1-K1-C4
gagccttttggagggaagtttcatgattgcacttataatgaacatattgcctgttttaataccctaagactccctgaatttagccccattcttcccactgctagatttctgggtcccttgttccttcaatgctcagaaagccccttccatgtcagggtacttggggcagcaattgagctgaacctgaggtccccttgctagggggcaggtgagctctctttgtgacttgctcctaggttggtgcctccatcaataaatgattttctactccccaggaggttggccctctatccatagctgtggctatcaccatctcaggctctgtcccttgcttcactctgggagagatggcagtgttcacctctgggacctgatccatctttgtctcagtccaggaggccccacatgtgcctcctggaaagtggcccca

SEQ ID NO: 3667 - DNA, 231 bp, Bos taurus
  Clone ID: 43-LIB3058-011-Q1-K1-C4
tcgatactccttaaagagctgattatttgtacacttacccgggaatctctgagaaaagatctaaaacactatgggatggctatctgagattcccgggtaagtgtacaaatactccttaaagagctgattatttcactgattttacattttcattgatatctggagtaagccccccagaggtcagacaaggaacaggtgaaattctgaaacaggagaaaacgaattagtact

SEQ ID NO: 3668 - DNA, 373 bp, Bos taurus
  Clone ID: 43-LIB3058-013-Q1-K1-C12
gcggacgcgtggggtttgctcaatgcttggttccaacttctgcgaattcgacgtgagctgacccaacatgctgtgaacttatgttgtgcaaagacatttctttacctaccggtgcctagagaccttgcatgcttaccgtatgcgctctgctcatgaaagggctcgtggcaggcctcccgatcctgccttctttacacaaatgcttgtccccgacctggactgtccagacagaccccagcagtagtgcttgagtgttggcccacttctcaccgcggtagattttgtgtatggtcacttcaccttctttgggaagaaacctttatagagagaggtattgcgaatatcttttacttacaatttgccgtgctaacac

SEQ ID NO: 3669 - DNA, 118 bp, Bos taurus
  Clone ID: 43-LIB3058-014-Q1-K1-C4
ttagcatgcgagcttcggcccttgccttgatgatgatgtcgttgttcatttgttattggaattggaaattgtacatctgaagaatcagtgagtaactgaatatatttgctgttttatt

SEQ ID NO: 3670 - DNA, 154 bp, Bos taurus
  Clone ID: 43-LIB3058-015-Q1-K1-C4
tcgacccacgcctccgaaaaccccattcattagttataacgttgctactaggactataaagaaacgtgctcagtgtcagctcgagcctgcattccaagctctactgtatcaggcgtttactgccctactttgcatataccctcagtatcgagca

SEQ ID NO: 3671 - DNA, 435 bp, Bos taurus
  Clone ID: 43-LIB3058-017-Q1-K1-C4
ctggtttcagtgacaaataatgttacgttggggttatgcttgttacttactgatttccccactaaatgtagcatttcaattagatccaacctcttacattttgagagaattgtaaaaagaatgaaattatgcagaaatggccaatatcttttattgatctgttcttttggaaactgtcatgcactataaattgtgtacagttaaaaaaaaaaaaatatatatatatatatatattcttacatgagtaaaaagcaccctcttcagcagttgtatggcattggtatttgaagagaattcccaaataacccattgctgctgctgctgtttttactttgtttgggttttttgtttttattttgtgtggaaaattgagattgaaaaaaaagataggaaagcagaaaaaaaaagactactgtttacagactgaaaaattac

SEQ ID NO: 3672 - DNA, 335 bp, Bos taurus
  Clone ID: 43-LIB3058-018-Q1-K1-C12
taccgtccggattcccgtcgcccacctcccaaagtcttccttggcccacagggcagatccctggctccatgggggcagggtctggttctgtccgcttctcttcccacctcacctcaattctccatccttctcactcccgatctccattggctctcctaactaacccttgacccccacctacctcttgataaaaactactccactgctccgctcttcagatcctgcttacgtactctccatccacctcataactcttcttcatccatctaattcatactcttctcgtcgattccaccgtcagtctgccaaaacccatgacttcccaacttattctc

SEQ ID NO: 3673 - DNA, 191 bp, Bos taurus
  Clone ID: 43-LIB3058-019-Q1-K1-C4
gttctagatcgcgagcggccgccctttttttttttttttttaacaaagttaggtatgatgtagactttgaattacttttatcagcgtgtggattgctttatactaagtcacattcctgagtctgcgcttggtaattgtatatttgcgatggttgaccttaaccgaacgttgatgtccctacctactccagc

SEQ ID NO: 3674 - DNA, 408 bp, Bos taurus
  Clone ID: 43-LIB3058-023-Q1-K1-C12
ctcgcgtctaggtcgcaggcccgggccggctgtgtcttctctgctctcccaaccgccgctgccgaccccgccgcccgccgcccgccggactcggacgcgtggccggttgagcctgacctgtggcctgtccctggccctctagtggagcctcttcaggcgggaacttctgtctacctgccctacagaggagccatcccaccagccaggtgagtgctaggcgcagcagccagaagtccagctcggggagatgctgcgtctgtctggaaacagggccccagggctcctctgccctctgtgtctccaccccgctcatgcagacacccagaaaggagagggtggcgtggctctggggaggggcacaggctggagcaacacttccccctgggtcggtgtggctgtcccccttca

SEQ ID NO: 3675 - DNA, 439 bp, Bos taurus
  Clone ID: 43-LIB3058-024-Q1-K1-C4
gtcggccgcaaggggagctgcaaagtcttgtaaaaccagtcaaagctggatctcggagggccgttgacctagaaagctatacttctcattctgttaacagttcatggactgtggccccaaacagagggcatgttcagggatcccagactggcgcggcctacaaacccatgcatcgcacacaggctttgcagcacaaagctcaacccaagtagctcagtgtgatggggccgagaaacccagccagtgtgtataaccctcgcagcacagagggcatgcccaggtagccagcagacaaacctagccagctcaaagggcaggaccagggtgctgatagaggggaggtgtacaaacttgggcaacacacacaactctcctgtggcacagctaatagaacaagtaactcccgtgacaaagagtgcagacactgatacggaacaag

SEQ ID NO: 3676 - DNA, 128 bp, Bos taurus
  Clone ID: 43-LIB3058-031-Q1-K1-C4
gacccacgcgtccgcgaagaacccacctttagcatccacctttatttgtccctcaacaggagagtcgaggagctgcagttcatgggggacgagtcttcctccaacagcttcttctaccctgatagtaa

SEQ ID NO: 3677 - DNA, 375 bp, Bos taurus
  Clone ID: 43-LIB3058-033-Q1-K1-C12
gtttagaatacgtaggtttacattatcgtttagacaaatattcactttatttatggtttgtgtattattttttaatttggggaatactatccagttttgtagttgtccttgttgatttgtgtgatgttaaagtattagtagtaactgccaggaaactgtcattagggagggtgtattcggttgctgtttggactgggagggattattgaaatttagtgctagaaacaaatgtttgtggctgtacagtttatcatttgtcagacataatgtatctatacaactgctctgttaagtcatatcaaataagttcatatgaatatcatctagtatatatcattttaaataaaaactttttatcttttttacattttaaca

SEQ ID NO: 3678 - DNA, 431 bp, Bos taurus
  Clone ID: 43-LIB3058-034-Q1-K1-C12
cgcagactcgaccatcatgcccccgcggatgccctgatccacgccgggtctcccggtctactaacatgctcggatttctccaccctgtgacctagggatctgcctgggccctgtccagtttgcatcaatcactcgttctctccctggtcctcagccacgctacagaaaatttcaattttaaaagtgactagacgagatcattttctgaaccctggaccttgacagtctgcccctcccctgcctcctgtggggcacggtggccagagatgcagtattggagcgatgcaggcagactgcccagtgctgggcagtcaccggggtgacctgcaggaaggtgaccagacaccagccctctcctgccccgacagcacccagggctaactgtcccctgtagtccacccactgcttggaccccctcatccactgtccat

SEQ ID NO: 3679 - DNA, 351 bp, Bos taurus
  Clone ID: 43-LIB3058-037-Q1-K1-C12
gcggcgggaggcggcgggatgggtggttccagcgccgggcggctctcaatgctctttgctcccctcaggcgcttgggcccgctcgctgctccaagattacgccgaggcctgcaaggacgcggcgacggcggcgcgggcccggcccgggaaggcggccgtgtacttagggctgctgggtggcgcggcggcctgttgctccctggcaccgagcgaggcagccttcgaggaggcgctgctcgacgcgtcggggacccttctgctgctggcgcccgccactcgcaaccgcgactcggaggcgttcgtgcagcggctgctttggctgcgtggtcgcggctgtctgcgccacgtgag

SEQ ID NO: 3680 - DNA, 287 bp, Bos taurus
  unsure (40),(46),(109): unsure at all n locations; Clone ID: 43-LIB3058-037-Q1-K1-C4
tcgcggacgcgtggtggtggaagaggtcccttgggtttcncagggncaggggttggaattaacctgtgccaaaaaaaaggcctagttagctgaactgcccctgtgccgncccaggtccagtatgggggcaggtgggccttgagttgttgctggttaggccgtgttcctctgttcagttgtaaaaagcagacgctccgtgtggggcccaggctgctggctgctatggggcctctctaagcagccatgcagcgccttccccacccttgattaaacctggaaccactgct

SEQ ID NO: 3681 - DNA, 204 bp, Bos taurus
  Clone ID: 43-LIB3058-040-Q1-K1-C12
cccactcgtccggatagtcaacgtaacgccagtgggccatttattccgggtactctatcccactctttgctgacttcaaaagacatatggcctgcctcccccataagctactgatttccacctttttcaaacacaatctattacaccatactcccacaacccttccctcttcccctcacacttccactctcaatttactaaaac

SEQ ID NO: 3682 - DNA, 346 bp, Bos taurus
  unsure (25): Clone ID: 43-LIB3058-040-Q1-K1-C4
cggacgcgtgggctataagagaatntttattttgcagtcttgatcaaactctgctgagggcgaaaagactcagaggtagagacttgaaccttccacgtccaattacagacttggtcaggcacaaaactatcacagaaattgcctgaggatgtcgaggcctaaccgaaaccgagtggtggactgtcccttaccttcacccgtcccgaagcacagcggtccagcagaatcaggcagtcggtggcctcttctaacaaggcgctcttaacacactcgggtgtgaggcttgaatcccttgctacatcacatatcagtttcaagagagccttcagtaagaccacaagtctac

SEQ ID NO: 3683 - DNA, 219 bp, Bos taurus
  Clone ID: 43-LIB3058-042-Q1-K1-C4
ccgaccacgcgtgcggtgaacttcgcggcttaatctccctctccagggcgaagggaaactagggggcgtaacaagaggccgacgacacaagccaaccagaggatgacagctaagccaggcgcaggccaaccggagctacaccaaacatgagaaggggatcgacaagagcaagcagacaaaccacaaccagcaggacggcgatctcacgacagagaacaa

SEQ ID NO: 3684 - DNA, 342 bp, Bos taurus
  Clone ID: 43-LIB3058-043-Q1-K1-C12
gccgaggatcagcaggcgcgcgtcctggttgcactccggcgcatctggggcgcaccccgcaccagtgacccagccctgggcctggagaacgaccccgacgcgcccgccgcgcagctcgcccgcgccctgctccgcgcccgcctggacccggcggccctggcagcccagcttgtccccgcccctgcccccgccgcggcgctcagactccggccccagtctacgacgatggcccacggccccgaggcgaggacccgcgacagacgcgactggacccactgtgagattgtgggcgtctacggacgcgcacgaccgcgtgccggtgctcgcgccgcacagaactgc

SEQ ID NO: 3685 - DNA, 387 bp, Bos taurus
  Clone ID: 43-LIB3058-044-Q1-K1-C4
accgcgcgtccgaatgagaaccactgtttatgcataacactatgaccagatcagagtgtccaatggaatgctctatctagtccgtgctatagcctgagggaaaacgacatgcagtatgacacgcatgggatcacatctgagatactagctgactcactagatggctggacggcaattaggactgcgacaaggcaatgtatgagcgtttataggaccttcacattctcatagacttcttacgtactaactgacttactaacgtgcttggatcagtactagcatcatctatagctagctctcctggatatacgactgcatacctattgaaatactggttaaatcccagacttcttccgagactaatgtagagatcaatggagcttacag

SEQ ID NO: 3686 - DNA, 287 bp, Bos taurus
  Clone ID: 43-LIB3058-046-Q1-K1-C4
ctagttctagatcgcgagcggccgcctttttttttttttttttttttttttttttttgttgttttttttttttttttttttttttttaccatttaccaagtgcttttattagggggggaaactccactcctttacaagtgggcacttggcaacttgacaggaatattgactccttgacagagtccacaggattttgctgtttccacagagtgggcttttaggcgttttaattctgggcttccaaaacttcttttgtgtttctggctcaactttcagaaataagtcag

SEQ ID NO: 3687 - DNA, 435 bp, Bos taurus
  unsure (37),(117): unsure at all n locations; Clone ID: 43-LIB3058-049-Q1-K1-C4
tcattcttcaccctttctaattctgactctatagttntattactttttcctagtttctttgatttgtccattgctttcttatggtcctgtattcaatttctagcacatctgtgattnttctccacttaacacatatttgcactgcttacacttatgtgcaatcttactccttgtctgcacacagatgtggaaagctagatataaaataaatgttaaagcttgatttttataaacattttaatatgtagtttggacatgatttattgaattaaggttctttaaactgaaagtgaaatgcatgccttccgaaaatgttttggctttgttaattctgtaataagcatttcattgagaaatatcaatccagttataccattttccaacgagtgaatttttcattctatctttgctttaaaaataactcaagggtacata

SEQ ID NO: 3688 - DNA, 205 bp, Bos taurus
  Clone ID: 43-LIB3058-051-Q1-K1-C12
gcaaccagaagatacctgtgtatgtctttttgatttatggttttgttggttgcaatacaaatcagtgcaaacaatacaaggtacacactatatgctaacacacatttcaccatataactacaggtctattacaaatatccctaatcatagaatcatatacttacatacgagtaaacacatacctcatatgcaagtacatctaaaa

SEQ ID NO: 3689 - DNA, 400 bp, Bos taurus
  Clone ID: 43-LIB3058-053-Q1-K1-C4
gaggcaggtggttggtgttcgcggtaacggcctgcaagctgacggcctgcgtctgtggcgaagccaagatgaacgccaaggcgggacccttggagctgcaggtgcagaggatgctcgtgctgctgtgcctgggcgccgtgaccctcacctgcctcctggggctggggtcctacccttccgcctggagccagggctgccctgaggaagggcccgccaggcctgggggccttggctcccgtgtggactgggatcctagaggacggtaggcccggaggcagcatcagcgaaaggactactgccggctcgtcctcgtggagagcatacaccaggacctgcaatctgtagcaggcagcccggtcgtccagcccctggcccatgcctggatgcatctactggacgc

SEQ ID NO: 3690 - DNA, 435 bp, Bos taurus
  unsure (425): Clone ID: 43-LIB3058-057-Q1-K1-C4
cggacgcgtgggaaaaacctccaaaaccagcatttcaaaatggctcctcagcatccctatatctgaagcccttggtacccagaggtcacacgcactttctgaaaactcctccaaaagatccttcaagaaaaagtctatttacagccttgaatacagttgaaaagggcagacagaagagtccccgaagtctgtgcatccagacccagacgtccccagatgtgctgtcctctgaaaaagcacttgagttggctcagtataagagcaaatgtacgaagcaaagtggaattatcctgcagctcaagcagcttctttccctgggcaacaccaagtttgaggcattaacagttgtggctcagcacctgctgtctgagagggaggaagcactgaaacaaaacaaaaccctatctcaagaacttgtcaacctncggggagagc

SEQ ID NO: 3691 - DNA, 427 bp, Bos taurus
  Clone ID: 44-LIB3058-003-Q1-K1-C12
gtcgagcggggccgccctttctttctgttttttttcactttaaaaagttattgattaaacaggtatatttaaaagtccaatattgccaaatccgtttgaaacatgtattctgggaagaagtattctgtcaaactttataaatgatacgggaaatgatagaagtagaacagtaacattttaggcaaacaatagagcacatggtaaatttagaaatacatccagacacacaaatatacaaactattgaagtatcaaaccaaaatgttttgtatgtttttaaatactgctggtatactcacgctgagggtcaaaatgtctacatttacgcttatgaacagcatatgaacacctttttaaggtaccatacttagataaataattttagaatatgtattgggggtattaattatgcacattcggtaaacatg

SEQ ID NO: 3692 - DNA, 424 bp, Bos taurus
  Clone ID: 44-LIB3058-003-Q1-K1-C8
atagcctcttatctttcctattttaaaaactgtcggtggagttccctgacgttccagaggttatgactctgcgctttcaccaccaggtacagggtttgatccctgtttggggaactaggatgctgtaagctgacgcatgtggctacacgaccggacgtacatatcgctactgacagatatgctaaaagacccaaacgtttcactcataaagagcatacacacacacacacacatatatgacaatcaccgcagatgtgatcaaatcaagcagtcgagacgattcacaagattctgtggactcaggtacgcaggtggtagatacccagtgatattgtgcatgattgatgaatgatgcatttcattctaaacgaagtttctagctagctgaagcttgtaatttgtgtgcactaatatttaaatcaac

SEQ ID NO: 3693 - DNA, 199 bp, Bos taurus
  Clone ID: 44-LIB3058-007-Q1-K1-C8
gtgctgcactcaatatgcaatatgcaatatgcactcaatatgcattatgccggctcccagcatgcatgtgctttatcatttgagccacctgtgaagcccagattctcaggataccatgctccaggcatgctggactacttgcctgtcctactatcacattggttatggttctacatattgcatgtctcatgatcctatc

SEQ ID NO: 3694 - DNA, 442 bp, Bos taurus
  Clone ID: 44-LIB3058-009-Q1-K1-C8
attcgggcgaagacaaacggatgcacccgtctttagaaccaaaaatattctctcacagatttcattcctgtttttatatatatattttttgttgtcgttttaacatctccacgtccctagtataaaaaagaaaaagaaaagaaaaaaaatttaactgctttttttggaagaacaacaacaacaaaaaagaggtaaagacgaatctataaagtatcgagacttcctgggcaaagaatggacaatcagtttccttcctgtgtcgatgtcgatgttgtctgtgcaggagatgcagtttttgtgtagagaatgtaaattttctgtaaccttttgaaatctagttactaataagcactactgtaatttagcacagtttaactccaccctcatttaaacttcctttgattctttccgaccatgaaatagtgcttagtttgcctggaga

SEQ ID NO: 3695 - DNA, 252 bp, Bos taurus
  Clone ID: 44-LIB3058-012-Q1-K1-C8
cggacgcgtgggcggacgcgtgggtcgtgagcggccgccctttttttttctttactagtcacgtttaccttttaataaggctttttactcaaaagtgtagcttcgaaaatctctagcttgttgcgacaaccagagaatccagagcggtctcgcctgaacacatcgcggggccctcacgggcgcttccagccagggtggaaggcgaacgcaccggttcacaatcagagccaaccccgaaattcacgggccgga

SEQ ID NO: 3696 - DNA, 258 bp, Bos taurus
  Clone ID: 44-LIB3058-014-Q1-K1-C12
cggacgcgtggggcaagatggcggcgcccagggcgtccctgcggctagtggccccggtatggaacaggggtaccagcggcatccgtggcctgagcaaggcagtggacccggagggcagtcagaagaaagggaggacgctgctccagttcctgactgaccacttctatgacgtggaggctgtgagggagtaccttctccggaagcaggtgttgaaggtgcaaaagaaaaatcggtccttcacctacatcaaggagcgat

SEQ ID NO: 3697 - DNA, 435 bp, Bos taurus
  Clone ID: 44-LIB3058-016-Q1-K1-C12
gaggggtttggattgaaagactcctatgatgcccaggaggcttattaactagagttctaagttgatttccttcagagaaaggtggtcagggatagcccccagttaatatcagaggagttggtgaaagtcataaaatagtaaaacagacagattatggtttggggggagatgctcgaacaggtccagggggcccctcgagtcctgacttgccttgcccgtcaggcctctcctgcatgaccttgtcataggtggggactcctgtgctggctctcagaatcaacctctccagtattcttccctgggaaatcccatggacagtggaacctggtgggctgtagttcatggggtcactaagagtggggcatgttggtgattaaacagcagcagcataatataagtgaatttcatacttccctggttcaaaattgggaaaag

SEQ ID NO: 3698 - DNA, 324 bp, Bos taurus
  Clone ID: 44-LIB3058-020-Q1-K1-C8
ctcactgtgtgtgggtttgtacaggtggcttgtcaaggtttcctggttagggaagcttgtttcggtgttctggtgggtggagctgtatttcttctctcaggagtgcaatgaaatgtccagtaatgagttatgagatgtctatagttttggggtgactttgggcagcctgtatcttgaagctcagggctgtgttcctttgttgctggagaatttgcttggtatgtcttgccctggaacttattggcccttgtgtggtgcttggtttcagtgttggtatggaggcatttgatgagctcctgtcacttaatgttccttggagtcagg

SEQ ID NO: 3699 - DNA, 240 bp, Bos taurus
  Clone ID: 44-LIB3058-021-Q1-K1-C8
aaaaaaaaaaaaaaatttaaaaaacaaacaaaaagcaacaaataaagtaacccctaattgacaaatatgtagtgtatcaaccacccaaagcatctacataaacagtgattgacagcttactgtaccaaaagttggcatttgagagctatgacccttctctattgaacccacttccctattgaaccacctcctgtatacttcctagatggggccccaacacctaacctctaaagataactg

SEQ ID NO: 3700 - DNA, 475 bp, Bos taurus
  Clone ID: 44-LIB3058-022-Q1-K1-C8
gattagttgagtcagatgaagatctgaggatgggaaggtatcaagcatatatagagatcacatttttaaaatataatttttctactctgcagagtgttggcaccactaaccatcccactatgctcggtgctcaagggtcaactgtattgacacattctcatcactacattggtcacaccatttctatttttcacccacttttccccttacctcttcctactgaggagtctataaaaggtaaaaccctagattcctcgactgtcttgtaagtagagaaaggccaaaaatacaatgctggccaaaaggatacaaagaaggttattgattccacccctttccaatcatctcccttcctgccagaatgcccatccgagacctagatcatagaaattaccaaaaaaaaaaataaaaaaaaagaagcaggagaaaagacagaagaaatctatatctcaaatgccatcacttagaagtaacc

SEQ ID NO: 3701 - DNA, 358 bp, Bos taurus
  Clone ID: 44-LIB3058-023-Q1-K1-C8
ctggggcctggggctttgccacccgacacccgatgcctcttctctgcatctttcgcgttggagagaagagactgagggcttcattcattgagccctggccccgagacaaatgtccaggctttatcttcatgaagtttaaaaacagttgaagtccagcacagcgatccgagagcaggtggtgaaaaggatgagctggatgtgagtgcaggcgtcaccctgcctggacatagggtgtgatgcgtgcagggcctgcccaaatatgtccccaggcaccctggtgctcctggggaggtgtcctgcaagggcctaatggttccaggaaacacggccgattccaaaagaagaggggcttgtgtgc

SEQ ID NO: 3702 - DNA, 404 bp, Bos taurus
  Clone ID: 44-LIB3058-024-Q1-K1-C8
gagaccagaaaccgcgctggctctacgggcccatcgcccgtagcaggaaacgctatggacccttgcctcatgcagctcggccttcgagccgtctacttgattctcacctacacgaccggcttcgacatgatactagactgtaccgatgtgtacagacagtactactccagatacatggttgtgctgtgaaaagtgctggctctcgtagtgccagaccacacgttgactacatccatgaatacgggtagacgtacatcatggatctggtcaattaattcatccagaacgttctcaccttgtacgtttccgtggaaaccttatgcaacccttcacgagtcaccatcattgaggaccagaatctctcatgacatatgatgtaactgatggtgtgaatacacttcatc

SEQ ID NO: 3703 - DNA, 81 bp, Bos taurus
  Clone ID: 44-LIB3058-032-Q1-K1-C12
cggacgcgtgggttaaaattcagtttttattaataatatattcataatatattagggggttatttttattgtttatgtttt

SEQ ID NO: 3704 - DNA, 444 bp, Bos taurus
  Clone ID: 44-LIB3058-037-Q1-K1-C8
ggcataactgggcactcagacttggctaggcaggaatttgggcggccataggtctgggtgccccttgaggggttttgcctatcacgaaacaatcttaaacctcacacaggccatagaaaacctggtctcaaaaaacggtgatgggaattccccggtggtccagtggtcaggactccatgctttcactgccaagggtgcaggttcagtccctggtcagggagcgaagatcctgcaagatatgcctggtgcagccaaaataacaactggtgatgcctttaaggcgtctccaagagtccccagatccttagccaatgttgagtttgacaataaccctggatcatcttctggatgaacaagggggtgtctatgcagtgattaacaaaacttgtagaacatgcatcagcaactcaccggaagctgaagtaaatactcacgaaattcatg

SEQ ID NO: 3705 - DNA, 432 bp, Bos taurus
  Clone ID: 44-LIB3058-038-Q1-K1-C8
gttgatatttactcacttactatatattctgtgtgatgcacatttccatggaatacagggttttaaaaataactatttttgctatatagcttacaggctcctcaaatatacctggcaaattacttctttctgctcctgtaataagaataaatgtaaatttgaagactctttatgtaagaaaagtaaccctcaccaagctgctatggactaatactttgcttgcctaaatccgtgtcttttttttttcacatccatatatgacggtgtctagaaacccattatgaaaatcacttgaaaaactgttaagtcatatattacctttaaaagcctaatgccttttttttttcaattataaaagattataaatgtaaaccacaggctcgcctttaagtacactttcaatttctttgaattgttagttattgatggcct

SEQ ID NO: 3706 - DNA, 420 bp, Bos taurus
  Clone ID: 44-LIB3058-039-Q1-K1-C12
cagctactggacttcataaattctgagtcctggtttgcattcctgctgagattgactttgactttctgcggtacccatccagcaagcaagttccgtaaagaacgctagaagtaggggagggggcgcttgccctgacttgcagtttggctttgaacatctggatcagagcacgtatgctgcagtctcgtgaatagttgtcatttgcctctctggtgacaagaaagactgttctgacaatcacctgggacttatgtcttagcaagtgaccttcactgtggccaccatttctaggcaccaagagaagatgccagccagcctgggggctcccaacatccacttgtggtctgagctgtccacactccagcccagcccccagcagaagcactgctgagcaccccggccctgcccccagcagcatga

SEQ ID NO: 3707 - DNA, 211 bp, Bos taurus
  Clone ID: 44-LIB3058-039-Q1-K1-C8
gtgccctctgcattgagcctggagcctttcacccagctctgcgctggtgactggggcgttgaaagtcactcagccatccatttgcagagctcccatcctggggcccaggacagggcactgatgcttgctgattcttggggctcttgtagccatgtccacctggaagctgtattgactggctcggttccatccaaggtgttaccggaggtag

SEQ ID NO: 3708 - DNA, 206 bp, Bos taurus
  Clone ID: 44-LIB3058-040-Q1-K1-C8
ctgactcacacaccggggggacaattagaaacaagaaaggaccttcaacactccattcattgatccaaagaccatatacataagcaatcaattttaatcgcatgatttacacatttacacctctagccttctatttccaagtactacacaatgcatatgtgaacgtacgtagtacgcatgccacaatgcacaattgaccatatcta

SEQ ID NO: 3709 - DNA, 390 bp, Bos taurus
  Clone ID: 44-LIB3058-041-Q1-K1-C8
ctctaactggcaagattaagttgccccgtcacttccttgatgtcgggctacaggcggattttaaagcacccatcagctaaaccgggccgccggtcacccacccgccagactgcggtgcacaccttcctcctgggctggcggctctacatggtactccagtttttgaatggagcccgatttagatgttagctctagaaaatactgaactactggagcagcaggtacaaaattacagacccaagagcaattttatttacagatccttttcccttcacgtctcctttaaccagacgtcagtctcttctgtcagtgaattaggggctcctctgtcaagtcggctttactaggccgcagtggaaagacaagttcacgttctggaaagtttatttt

SEQ ID NO: 3710 - DNA, 236 bp, Bos taurus
  unsure (30),(94),(230),(232)...(234): unsure at all n locations; Clone ID: 44-LIB3058-042-Q1-K1-C12
ctgtgttgccgtgccaagcgtcctgccgtngtggagccagtgttgtcaggtcaacttgcaggtctgaccccacatggaggccttaagcacatcncccctcaccaatggccccatctgcacacacaggaggaaggtagtctggccgacagtctcagagccgctgtgctgggcctgagccccactccctaccatcctgctcacaataaagtctgaccctcaaaaaaaaaaanannnaa

SEQ ID NO: 3711 - DNA, 89 bp, Bos taurus
  unsure (55): Clone ID: 44-LIB3058-045-Q1-K1-C8
accggtttcggaattacccggcgtcgaccccacgtcgtctcggtggaacgtcgangtggcctattggctggacgtttttgctcccaaat

SEQ ID NO: 3712 - DNA, 101 bp, Bos taurus
  Clone ID: 44-LIB3058-046-Q1-K1-C8
tcgccgacatccagtgtgaaactctttgtggtttcctgcggtacgatgtcccaggtcccgaatcgcggtatgcctcgcgtcaaccatagacatgtacatgg

SEQ ID NO: 3713 - DNA, 342 bp, Bos taurus
  Clone ID: 44-LIB3058-047-Q1-K1-C8
gggacagtaggcaggctgcccttacctttatcaggtggacactgtctgatgccacccgcctcggtcgtggagccgcagacattcagagcaggggtgtcagggttgggagaaggggtagctgaaacctcaggaagactcccaagcccttggctctgaacaggctcttgctgggaagagaagaaggctcacactcggctaccaggacgggccctgctattggctcacacagggtctcggggtgtggactccaggcctggtctatctttggatgatgctgcaagccccaccttcctttcctctcagcccactgcccccctcgctgcctctctggactcaccccat

SEQ ID NO: 3714 - DNA, 442 bp, Bos taurus
  unsure (391): Clone ID: 44-LIB3058-048-Q1-K1-C12
gtgcacacacaggctcaactaattagttagtttaggtatagtgaaaaactatttgttggattattttttgtttaatataaaaatgaaagaaaagattatttaattcataaaactaaaaagaagcattgaaatcagtattatacatggataaagaaaaaataaaacattttgactaggaatttaaaaatcaaaatggtacaaaagtgttattactgtcactgaggctttttgttttgcagataaaaatgatttgttaatgaatcataactgtcctaaaaactaagggtagtgtgattaaacaatcttattatgccataatacttcaggtataacatgaaacaatatatttgatcctatactacagcacaacttatccactgttttatttganaataaaacatgcctgaagactttaagtctctattacataattgtttatcat

SEQ ID NO: 3715 - DNA, 444 bp, Bos taurus
  unsure (431): Clone ID: 44-LIB3058-050-Q1-K1-C12
gttctagatcgcgagcggccgcccttttttttttcttaaatctttagagagcaaatcaaaacaaagttacagtgggaaggcctctgattgtactctttggttttctcatttttatttttaaagactacttcgtaagatgcagcttctgcagaaaccaacatgacaaatgacatatcttaagagtcttatgttggtaggaatctgattctggttcctttttgggaataagttgggcaggataaaggcacaaaagagagatgtttgaaatctctggttctaaggttttttagtgagtctcagctcattgtttatcctggggaccttaaagtaatttccttcacagaaataggattattttattactgcttttacagctgattcatgttttttttataattcattggtcttcaggaattgagactttatgttgnttcattttaattt

SEQ ID NO: 3716 - DNA, 405 bp, Bos taurus
  Clone ID: 44-LIB3058-052-Q1-K1-C8
gttctagatcgcgagcggccgcccttttttttttttttttctgtagaaattcattttattcttagactattttcaaaagaagcagtggtgtgctgtttttctaaaaatatgcctttatagattcatatataatatgtatattataaaatccatacatgtatttacatggttgctacatacaaaattacagcactgtgtctgtacagcactgcgtctgtacatatctgtaggtacattctttccactcatccctgctgtgctttccccgtgagggaggaagatgatccttgtaaagcagcttgagggcggcctcagcccggtgcctctgagtcccgagtcagggcctcagcagagaaggtgaagcggttgctgaagatgagcaggagtgggaggttgctggggtga

SEQ ID NO: 3717 - DNA, 407 bp, Bos taurus
  Clone ID: 44-LIB3058-053-Q1-K1-C8
gaagccaccgtcgccgccgccactccgccacgccgccgccacactgaggactccggaggccgccgcgggacctcgccggccgggccgcctcgtctgcagttgtattgagttgtctccgtgtccccctcccccgtgtctcccctgccccgtcctccccctcctcgcactcttccctcggttcagcacaggtaaagcggttaccctccctccctgcctcatggatcaccagctcacgtcatgtttccttctcttttctttttgtgtgtgtttatttaagttattcttcttcctccccttttcttttccgtctccctccctcttctgccatgtaactggagggtgcgatgagttgcaaacagctggactgtcaggctgcttctcttgcagatgtcctcctctgcctcccc

SEQ ID NO: 3718 - DNA, 255 bp, Bos taurus
  Clone ID: 44-LIB3058-054-Q1-K1-C12
gcatttcattcttggcaccagtaagatcttttggaaggaatagagtacaatggtggagactgttattgtgtggtaaaacactactctcggtatattagagaagtttcatttacctaaatgtctattcttaaatggaataacatccacattggactaaattaagtactggtactgcttctaccatgcccacaggttctggaagatatgggattctaagctttagatttgtggattacagttctgagctctgtaatg

SEQ ID NO: 3719 - DNA, 411 bp, Bos taurus
  Clone ID: 44-LIB3058-057-Q1-K1-C8
caaaaaaataaagccaaggctttgtatgggattctaccaggtgtcttggaaatgcctgtaattggagacaatttgcaatgaagcccttgagattcaggctgttgaattcatccctcaacccaacttctgtatgaaaccttcagccagcaacactccatgtgggtgagactcctgctgagcagagtccacgggctgtccaaatggacgcaggccagccctcctgccacgttcctgacccgtgtccataggaagacattgatgtatttttcacctggaacccttgatactgcaggctcttatcatcttagcagcgatctccagaatttactatcaaagcaggagtcagacctcacccgcgatagaccagacttaagccttggcaggcttccctggtggctcagcagtaaagaa

SEQ ID NO: 3720 - DNA, 130 bp, Bos taurus
  Clone ID: 44-LIB3058-058-Q1-K1-C8
gtctttcacacggagcacggggctggtttagtaaggcaaggaggactagagcgtgcgaggctggagagcatacatacagctggaggctttcgacgtgacgagccacgcagagctctcgctgctggagaag

SEQ ID NO: 3721 - DNA, 313 bp, Bos taurus
  Clone ID: 45-LIB3058-003-Q1-K1-D2
acaaatgactgttcctggctctcaagtattgcttttagtgcgtccgggtccccggttctagcagccatcagtgcgcacatgttcgcatccttgtatgcgccctctggggcctacgacgctgccgtcctggcgcttaccgcggacctaggtgaggcctgatgcgccctgtgccagagcgcgcaacgcgacccggtgcgcgccgactgcggccatatcttttgacgtgcgtgcgtgatgcgattctgggcggcagaagacggacccttgccgtgtcccgagtgcaccgacgactgctggcagcgcgccgtggagc

SEQ ID NO: 3722 - DNA, 429 bp, Bos taurus
  unsure (309),(331): unsure at all n locations; Clone ID: 45-LIB3058-004-Q1-K1-D10
tgtatatcagttgtttttctgtcttactgtgcggcaagtcacttatctcctaactaggattttaaaagcttttagaaagtcctatatcagtggtgttatcatgaatttgtaagtgcatctgaagagaagatttgtcaagagtagcgaccacaatccaatgtatatatctctaaatgcatgtatatattatcgcttatccttgaaagagtattttaagcattgaacttgtctcagtaatgttttgtttcatgaccttggtatgttttacaatcattttggatcgaaatattaatttaattttgacctctntaaagtcctgctctaactactngtgacaagtaaatagagtgacataacctgaataataactctacttgaaaacttagatcacacacctggcgcataaaggcaggcactcaggaaatgaat

SEQ ID NO: 3723 - DNA, 154 bp, Bos taurus
  Clone ID: 45-LIB3058-005-Q1-K1-D2
aacaactaacagtgagacacgtgccattccgaactgtgagggtacccaagaaaaagcaaacaggaatactttgaaaattttaaaaactgtttttttgtctgccaaggactcaggaaaattaaagcattttctattttagaataaatcgtgaatg

SEQ ID NO: 3724 - DNA, 442 bp, Bos taurus
  unsure (431): Clone ID: 45-LIB3058-007-Q1-K1-D2
cggacgcgtgggctggatctcaagaaacctcagccacggtatcctgacaatgcgaggcctagatcctgggaccccatccactggatcctgaatcctctccctccaaccactggattcctgaatccctttacctcaacacagggtcccagatcccgctgcttcaactccccgatccccacatttcaagcatcattccctcgacacccccaaccatggacaccagattcccaagccctgatctgccagatcctcactcctcaaaccacaacctcgagaacccaatggcagaggagcggttccaggtgactacgactgtaggaccccagaccgcaggcactggacattgaaactccacccataagaggcagaccctgccacctctaggcactggatgccaaccccttaacccctgacctctgacctgaaccctnccaggcactgg

SEQ ID NO: 3725 - DNA, 73 bp, Bos taurus
  Clone ID: 45-LIB3058-008-Q1-K1-D2
acggcactctgtccacatctgaatgttagcgacagggagagaggcttctgagaaattggggggctcagatgca

SEQ ID NO: 3726 - DNA, 432 bp, Bos taurus
  Clone ID: 45-LIB3058-009-Q1-K1-D2
gcgagcggccgccctttttttttttttttttttttttttttttttttttttgtagcaactgtaaattatttcccaactggtgttttcataaacattcagtataaatggccattaagaaggtacagttattcatgttaaaattaatccaagcatgcccaattccacaaggcatggacatctgagcactccctctgccaggcatactccttttctaatttaatcttcaaaatgacccggcaaaagtccataaactgaaaggttatgtatcactaagtgacagagctggggatggaactcaagtcagtgactcgagacgtgagtaagttataggtttcagatgaatgcataaaatatctttatgaagacaaccatgagaaaaaagttactatggaatgtaactgagaactttttataaaagactttcaaaattct

SEQ ID NO: 3727 - DNA, 336 bp, Bos taurus
  Clone ID: 45-LIB3058-010-Q1-K1-D10
tcgacctcacacgtaccgtcaagattgagatccccctcttctcacgtgctaaacgcccgaatcaccttcagcaaccgggatggctgctatgaccccatgagctcagattggacgccggcgcacggctctgctgacgcaacttcacggaatgcattgctatgttaggtggaccccaccttgttcgaagtacccgaggggaacagcatgctgcgtgctgagcgcatcgagccactgcttgacgaggatgatgacctgctgcagattgccatccagcagagactgctggatgcgggcactgatgcgaatcacacgactgtctatgaagccctgaccaac

SEQ ID NO: 3728 - DNA, 413 bp, Bos taurus
  Clone ID: 45-LIB3058-010-Q1-K1-D2
gtgaacatctcacttaaattcaaagactgtgtcctttagtgactgcaactggtattgggaccaataagaatatcataggactgatggtagaaatcctaagaaagctggtttttaaattgcaaggaggaaggtaattatatacaggcaccttttaaaagatggtttattattatagcagtcagtatgcatgaacctactctcccctgcattatccctcatctcttaaaaatagctggttcagtgaaaatcttacttgttggtatttcagattaaaggtaccagttttcagctatacaaatatgatatataaagaaatgtgcaaaatagcaattgaagcttcctggtaaaaacaaaacaaaaagttaagagtaaaatatagcccaaaagcaaaatataaatttgatattccaaat

SEQ ID NO: 3729 - DNA, 245 bp, Bos taurus
  Clone ID: 45-LIB3058-011-Q1-K1-D2
cggacgcgtgggccaaggctctctctgctgctcacctggcccagagcctagggtgcccctggctgctgccagcccagcccccactgtgccaacaccagctgtcctcgctgaccctgtgttctccctggagctggccggggcttgggcggaggcgggtgttgtctgccttccctcccaggcatctctcctctctggtatccttcctgccgaagtaaagctatgccgcaaggactgtgaatgagaat

SEQ ID NO: 3730 - DNA, 175 bp, Bos taurus
  Clone ID: 45-LIB3058-013-Q1-K1-D2
tcgacccacgcgtacgaagacattggtccctagtagtgaggaagcaaatgagaaaagctctttgatggtcacagtctgagagttttcaagcttcagcacagaaaggggagaaccaaggcagaaacttcacctattcctgaagggtattaagaagttaatgaaatagagatgaaag

SEQ ID NO: 3731 - DNA, 326 bp, Bos taurus
  Clone ID: 45-LIB3058-015-Q1-K1-D10
gcgagcggacgccctttatctgtgcgagttcagtaggtttcatataaaccacagaatatatttaattcacattagacatgggactagagtaacgttcgggccttatcaagtagccatgacattgtttaaaaaaaaaaagaacagtacatttgtggatacattctggcagtccaacaaggcacaaggcgatccagtgagctgaggtgacggattcaggactgaccctgaatgctcgaggttctgaggggtatgcgagacactgaccatagttcatacagaatgattctgcaccatgtacgagagagaggaaactgcgctgtgataga

SEQ ID NO: 3732 - DNA, 411 bp, Bos taurus
  Clone ID: 45-LIB3058-016-Q1-K1-D2
cggacgcgtggggcccgctgggtcggaagcacccctcggcctcgggggctagagacagggttcccccatgacctcctcggagaatggaagcctgggtcctgcgtgagccatctcgagggctccccctctgcttggtgacatttctaatggcctatcacttcgcagaggtctctcctgcagtgggaccaggcagggggtcagagggcagacagcctgggacagagacacagccagagctgctggcgtgggggccgcagggcatcacggagcacatcttccccaacctggggggtcaggggtctctcgggtccccagactcactgtgggagagagggacggaaacctgggcctgggggacctttgccctgggggtcttgagcgacgatttcagctttagaggacagagaatct

SEQ ID NO: 3733 - DNA, 411 bp, Bos taurus
  Clone ID: 45-LIB3058-023-Q1-K1-D10
tctaagcgagagtaggtactgcagccccagcagagaaattaaatcactctcttgcataaacgctttgggatcccagacagaagggtttcaattcgctctctctgacacacacacacacacactgtactcttgccactcccactcataccccatctatgggaaacactgtagtgttcataacaaccaagagatagccttagaaatggcaactgacaaatgggaaaagcagaaatgatcattgattacttgatagatcttttcatacataggagtttaagaaaccaaagtgtcataacttaaatctcagttctcaaagactaaatagttcatattgatggcactacaggacaaacaaatgcttattatatacctgctacagatatatgttacacaatagcacatagagaagac

SEQ ID NO: 3734 - DNA, 233 bp, Bos taurus
  Clone ID: 45-LIB3058-024-Q1-K1-D2
tcgtcaaagaccggagacctctggccggtgtagatgttcaatccacggtgcacagaacatctgatgtgaccaggcacggcacagctggatattcattctaccgacgctaatatggcctatgggttgacggctgctgaggctgttcgtgcctgacttgtgtaagttgcgctgccatattaggatggcctaactatgaaggtctgatgtgtcttttctagaaagtagcagctgtt

SEQ ID NO: 3735 - DNA, 330 bp, Bos taurus
  Clone ID: 45-LIB3058-026-Q1-K1-D2
gtgaaagcgttttttagccgcgtggccgccctggctttcgagcgctcggtactgcaggacttggagcggaggagcaacagcccgctgcaggtcggcggcggggacgtcatccggatggagggacgtcgacccgagaccccggacagcaggaggcccttcggcccgagttgttgttagccaggcctgcggcagatgccttcccacccttcacgaggcaagccggtggtgcctccgtgacatggagggggacgcggagcgcccactgtgctgagctccagggccccccgccttcttttctacgtagcggggcgggagccataagaggccccc

SEQ ID NO: 3736 - DNA, 172 bp, Bos taurus
  Clone ID: 45-LIB3058-028-Q1-K1-D2
ttttatttttttttggggcacagacgctgggtattgagtggcagacgcaggagaggtaactggctccggagtggaagcagaagctgaggggtgggtcattccaaggccccgtgagcatcttgcaaccagggccatacccccccattctatgggacagcacaagcttactgaa

SEQ ID NO: 3737 - DNA, 55 bp, Bos taurus
  Clone ID: 45-LIB3058-030-Q1-K1-D2
tagatcgcgagcggccgcccttttttttttatttttttgtttgtgtcacaaatca

SEQ ID NO: 3738 - DNA, 387 bp, Bos taurus
  Clone ID: 45-LIB3058-031-Q1-K1-D2
cggacgcgtgggtagatcgcgagcggccgccctttttttttttttttttttgacggttgaaaaccatagttgacttttaatttcgaaacaaattaaatacagttaaattaaaacagacgacggtgcagctgtgggggccgccctccccactgtgtcctccgggctctgccccgcccccccactcccgacgggggagcaaacaagctgtggtcaccgacccaaccatggctcataacgaactcattcccaacgaagacggaagcttgtttaagtccaccagggttataactaaataaatacacatgcagcgaaaagagggtgttaggtgaacaactgaactagtttctgccaaatagattcatatagagtcgattccgttttgtggtt

SEQ ID NO: 3739 - DNA, 419 bp, Bos taurus
  Clone ID: 45-LIB3058-033-Q1-K1-D10
cgacccacgcgtacgcaggaatcaattcatagagctgcggccattttcttttctgccagcagcgttccacagtgcggatgagccaacatacaccaggcacggctaactattgttctcttagaggttctcacttttattcttaaagactacttcttaagatgcatcttttgcagaaaccaacattacaaatgacatatcttaagaatcttatgttggtaggaatctgaatctggttatcttttttgggaataagatagtcatgataaatgcacaacatagagatgtttgaaatcttttgttctaaagttttttagtgagtctcatctcattgtttattctggggaccttaaagttattttcttcctagaaataggattattttattactgcttttacagctgattcaatgtaattttata

SEQ ID NO: 3740 - DNA, 314 bp, Bos taurus
  Clone ID: 45-LIB3058-034-Q1-K1-D10
cgacccacgcgtccgatcgcgagcggccgcccttttttttttatattttttctttttttttttttttttttttggttggttttttttttttttttttttggaaaacccggaaaatcccttttgagggagcttatttcggcaattaattaaggggctggatggtaaaaaattttgacaatcaactatttacacccagtaaaaaccggtttttaagcaaagggaactttttatataggggaaaaattccattatattccattgccaaaaaaacattaaaaactttgtataactggataaaaagcaactaatttttt

SEQ ID NO: 3741 - DNA, 409 bp, Bos taurus
  Clone ID: 45-LIB3058-034-Q1-K1-D2
ctcgaggagcttctgcttgtcctgaccattgtctcggaggggttcccccggcgggccgtgatgcgggtcttcacagagtggctgcgggacggctacgcagacgtggccgaggacccggagcggtttgtggcccgagtgctgcaggcggcgagcggggacctggactgggaggtgcgcgtccagggcctggagctggcactggcgttcctggagcagctgctgggcccctgcggcccctccgcggtggccccgcccggcgcactggcccaggccctgcaggcgctctgccgggtccagctcttcgagttcgccttccggtccttgtttgactgtgaccgccccgtggcccagaagtcctgtgacctcctcctcttcctgagggccaaggccattccctccagcaactcgc

SEQ ID NO: 3742 - DNA, 221 bp, Bos taurus
  unsure (31),(86): unsure at all n locations; Clone ID: 45-LIB3058-035-Q1-K1-D10
cggcccgacccacgcgtccgaagcacggggntggagaattctgactttcgttcaacacgcaggccaggcacagaaggggaggatcnatcaaacaagaggccggccaccgaggcgcaagaaaccacagaacacgacacaggaggagaaaccaaaagcgagagcacgcccgacagcgcacaagcgcagaacaggccagagaaacagaaccaggccaaagagcc

SEQ ID NO: 3743 - DNA, 265 bp, Bos taurus
  Clone ID: 45-LIB3058-037-Q1-K1-D10
gcgcgtgcgcgtgggattttgtggtatggtactcttaaactccaaaacgaaaagtggggatctcttgctcttcaaggagaaaaaaacaaaataaatgccgtttagtgtctctagccctctgaactgcaacagagaatttgatggacatatcctaggcctgagcagctgcagctttgggtctatgggccagactctgactgcatcagctgactctaggggatcacatactggcaaaccgactaaaattgtatggattaggctggac

SEQ ID NO: 3744 - DNA, 432 bp, Bos taurus
  Clone ID: 45-LIB3058-038-Q1-K1-D2
gccagttctcattgactcagggctgagttattttctgagacatcctcttttggaggtgaggggtctagctggaagaacttgaaggtaaagattctcatcagtgttcaagaaacttgtcagaggttagtggaacacagggagagtagaaaacaggtgcagaagagtttttttgacctatggtctggaaatgaatccatcccacagtagtgccatggagtttagtacatgtcgctaggacatctcatcccttttacagaaaaacgaggtccagtaatagcaaatcttagcacatcctcacttttattataaatgggtgtttgtggtttttttttacaatttttactgacactcagtaaccatgcaaagttgtgtacaacattcatctgtctatatatctatacgtgtctgtatctatctatatatcaactcatg

SEQ ID NO: 3745 - DNA, 443 bp, Bos taurus
  Clone ID: 45-LIB3058-039-Q1-K1-D2
agcagatactttatagcctgaccatatttaagtctgtcatgcttagtctatagaatctatacattttattcttgacaatgtaagttttcagaataaagtcaggaagatcaggtctttattgataaatttaagtagaagattgatgcactaggacagtcatctgttaatttagtgcctttaaatctttttacctggacaacctattttcttttttggattactggtgacccctataattttctgcttaacttcaaagcacagtattgtattatccatcataggacaggacccattgttaacctacaatcaacagagcctgtattttgaattatttcagcagaggtggcaacttccagtggaacttgagtgaggtgtgtggtctgtgatcatttgatgtggccaatcaactatctctgattgggctccaaaatatagtaaccctg

SEQ ID NO: 3746 - DNA, 301 bp, Bos taurus
  Clone ID: 45-LIB3058-043-Q1-K1-D10
cggacgcgtggggtcttggggaagcagtatattaaataaaatacccatggcagtataaagtcatcttttaataaatatggaatttgtaaggtcctaggaaggtctcaaaaaatctctttggaatgcattttaaaagtaaccaatgttcatgcttttttacacttaatcctaacaatgttgccaatgaaattgagaggatttaatcttgacatttcccttctggatttaaacattgtactcgggaagggaagtcctggctggctatgttgcttttctgtgaagtgtcaagtgtgtgggtgcc

SEQ ID NO: 3747 - DNA, 418 bp, Bos taurus
  Clone ID: 45-LIB3058-044-Q1-K1-D2
catttttgagcagcttcgtttccgccttagcagtgtggggagcatctttctgtctgcaggacacctgattgggccggttctctgccactccttctgcaattacatgggctttcctgccgtgtgtgcagccctggagcatccgcagaggcggcccctgctggcaggctatgccctaggtgtgggactcttcctgcttctgctccagcccctcacggaccctaagctctacggcagccttcccctttgtgtgcttttggagcgtgcaggggactcagaggctcccctgtgctcctgacccacgctccgtacacactactatgaactctcacaggcttcccatgccctcccggtcaaggggtacttcaggggatgagctggcgggaggccccgagaactcaggaatttttgtaggggattg

SEQ ID NO: 3748 - DNA, 338 bp, Bos taurus
  Clone ID: 45-LIB3058-045-Q1-K1-D10
cggacgcgtgggcggacgcgtgggaagtttatctggataattgtattcagtaaaatgtttttgattatagtgcaaatacatctgataaaacttctaatgtattgctttgtaactttaccatacatgagttgtagtaatttttattcatttgtttgcttaaccacaaccactattttaatgatatactaaagactatgcatttagtttttttcaggaatagctgaattttctgtgctttggttgtagagttttatttctaaagtttctaagtgaatcaatttaatgaacattaaagagttagaacaatgaccaaataaaagcttgttttgatctttggg

SEQ ID NO: 3749 - DNA, 411 bp, Bos taurus
  Clone ID: 45-LIB3058-052-Q1-K1-D10
gagacaggtggctagttgctggaaggatgaaacagttgttcttgtgtgtgcaaggtatttctttctgtgtacagctctcctgacccttccctcagatttgagattctattccctcattagggagaggtttaaaactctgtttaaaaagagtttctgagcttaaacgcgtggctcctaagctgaagggaatacccatgtattcaggaagtgacacgttttcatgtttagaacctagggtcccactcgctcctagtgatccagggctatttgtgcagataagtgctccacaccactgctgatggctttggtgcgtggggacccctgtcctcctgggcatcatcttcaagcggctcctgccgctacttgaaggggtgggttcctgatagcttggaagcactccgcactaaacgc

SEQ ID NO: 3750 - DNA, 440 bp, Bos taurus
  unsure (375): Clone ID: 45-LIB3058-054-Q1-K1-D2
ctttgaaagccaaagaacaaaagtcattggtgatttgactggaggatctgaaatcaactgaagcagtgactttatcatgtatgttagtttcaaaataacaagctcagatgattgggtcagtcatttttaatgaagagcattcttcatttgataaaaataactgatactttatttccatcgtaactttaaagccatttcattggtcatgtacaacaaagtaaattgtaaatccatttttctggatggatctgtgagcctgacttaaggtcatgtgaagaaagagtttgagtttgtcctttagaagtatcacagaaggaattttctcacaaaccagggtgccatttttagctaacagtaacttgtgggtgagaatanggaagactgagtaaagagataatagcactcacaattgtgtggagcgatagaatcattaccatact

SEQ ID NO: 3751 - DNA, 119 bp, Bos taurus
  Clone ID: 46-LIB3058-001-Q1-K1-D10
aactaatcctactgattactatgagttttgggaaacagaatacagccacggtgactacaaagctagcttacaaaaaaaaaaaaaggggcggccgctcgcgatctaacactagtgttcta

SEQ ID NO: 3752 - DNA, 429 bp, Bos taurus
  Clone ID: 46-LIB3058-001-Q1-K1-D6
gaagtgatctcaaccattgtcctgcgtagtcagcaccaatggctcagatcagaggtcaagcggtgtggtctgcaggtaaatgtgacgctatgactggatctataagtaaagaatcatcggtgcagaatcacacctgctcatacacttactgactgtgactgatttactgcttaaaggacagacgtgcataattgtgaacagagctggtatagtccagaaaatctcaaatatttactctctacctctgaagaaaaatgtagcttgatcagagtctgtgtgagagattaaatacaattgatctccttggattccaggaatactctgctcaagaccaactgaagttttaaatttttcctatttttgctttctttttcaacattgaaaaagtgtgcctgggtgctaagtcacttcagttgtgtctgactcttt

SEQ ID NO: 3753 - DNA, 149 bp, Bos taurus
  Clone ID: 46-LIB3058-002-Q1-K1-D6
tcgcccacgcgtgcgtatgctcgtgctccgacgtcttgtttcttagccaatactatcgccgaggctccggtctaggtctgcataataatagttgcacgagatttaatagttcgaatgcttctccactgagtagttgagtcacaaatctg

SEQ ID NO: 3754 - DNA, 113 bp, Bos taurus
  Clone ID: 46-LIB3058-003-Q1-K1-D6
gtagcgagtggcgagacgtagttttttttttttggatgtatgtttggtggcttgaggagggtatacggatgtgatttgagagatgtgaacgtggatagattgatgttgggata

SEQ ID NO: 3755 - DNA, 229 bp, Bos taurus
  Clone ID: 46-LIB3058-006-Q1-K1-D6
atcgcgagcggccgcccttttttttttttatttgtttgttttatttattttcctttcggcaataacagttcaatgaatagataaatcctgggtcaaaaggaaatagacctagtttcgggaaaacatgctgaatggcttagatgacatcctggacatgagtctgagtgaactccgttagttgtacatgaatagcgaggcatgtcgctatgcctgcatggtgtagcaaagg

SEQ ID NO: 3756 - DNA, 380 bp, Bos taurus
  unsure (371): Clone ID: 46-LIB3058-008-Q1-K1-D10
tttgaaacagatttccggcattttattttttctttatatgaatcgagcacatgacacagttttgctttcccagattcatctctcggatttatgctcatatctcttaagaatcattaggttttttaattttattacataaaattctttgaaaaaatgcataataatagtctttgtgaatgggttttcccactttcatttactattcctcccttaaaaataagtgtttttttttttaatctactccagtatcataagtagatcttaaatcagcaatgagttctctttgtagtaggaaagtacagtctgctgttaaaatgtctgctttttggaaaccgtgctccatggtctccaaaaacctgaaaatgaggttntactttgat

SEQ ID NO: 3757 - DNA, 427 bp, Bos taurus
  Clone ID: 46-LIB3058-010-Q1-K1-D6
gtataatctatatcatggatcaaatttagtgaatccttcactttttttacaaataaagattttccccccttttctacaatatactctgcccaactgataatgtatttatggacacttgtcctttggcatctccagattatattcattttggagatgaattcagttaccaccaagaccttctgtcagtattttaacgcctgctttggtacagggtaataatatcccactaaaatccatcatacaccttacctgtcttgggattccggcttcgtgctgggatttatttcctgattaacactacactggacagtgggaggtctgcaaccccagctctgggagaaccaactcatataaagcaaacggtggccatcttgatggtctcgacactaatttttatgatacaaatttataaactgatttttgtaaa

SEQ ID NO: 3758 - DNA, 412 bp, Bos taurus
  unsure (167): Clone ID: 46-LIB3058-012-Q1-K1-D6
aaataggtaatctgtccggttgcgacaacattgcattagaaaccattaagtacttgtggtaagttggcgcgcttattgcattatctttgtgatcagttttccagctattgttgactattgttagtgattatgagaaataaattattctttctgatggtaaataattntaactgaaggaatatcttgagattgtaagaaaaggcttttatttaaaaaaaaaaatgtaccacttgtgagtacttacctttacaaataatagttcaatttttcaatactgtcaaacaaagtgatacacccggatttcatgtgtttttggaatttgtaaaaatggcctcattgttctcatgtattctcagtagtaaagtgttataaatgtgaagttataaaataaatccattctggtaagattctg

SEQ ID NO: 3759 - DNA, 436 bp, Bos taurus
  unsure (388): Clone ID: 46-LIB3058-013-Q1-K1-D6
gcagcatcaaggcaacaaagatgctaaagacaaggcagagaggcccgaggcagggcccatgcagccaccaccgccccagatacagaatggccacatcaacggctgtgagaaggacagctcatccactgattctgccagtgaaaaaccagcccttccccctcgtgagaaaaagatctcaatactggaggaaccttcaaaggcactccgtggggtcacaggcccaaatattgagaaatcggtgaaggatttgcaacgctgtactgtgtctctgactagataccgtgtcatgatcaaggaagaagtagatagctccgtgaagaagatcaaagctgcctttgctgaattacacaactgcatcattgacaaagaagtttcattaatggcaganatggataaagttaaagaagaagccatggaaatcctgactgctcgtcaa

SEQ ID NO: 3760 - DNA, 255 bp, Bos taurus
  Clone ID: 46-LIB3058-014-Q1-K1-D6
tcgctagtctagatcgcgagcggccgcccttcttttttttttagctcttttattgtcactggttgagatatataattctaactttatatacaacttgggccatatctgatggaactctgctggcaaactttatatccgttactttatccactatacatttttctatactactcagtgccctataatccatggagtctcaatatgtctgctctggacagagtgacctttacttttacttttattgtgccttaaatg

SEQ ID NO: 3761 - DNA, 430 bp, Bos taurus
  Clone ID: 46-LIB3058-017-Q1-K1-D6
atccagtatctttgtaaatatgtgattcagggcaagggggtgttggatatgtgtcatgatccttagtcaaaggtcatctgatgtctatgcagtacccagtgaatacatctgtggaacttttgattatctaggcctaggtagatttagaacaaggacatttatctgcagccaagacatttgtatttgcttgataaattgagctcaaagagacgaaaggttcatctgctgagcataagcatgttagcattatgtctgtaggttaaagttctgcttctttggttgccaaataccgatcatcatgctcatgacttaaaggttgtgaagagccttgtccctcttggtttcttgagttggcgtacaggaaaggcattgactaactgtcatgcatgtaaaatcccacgaaagcacacttttggtagtaaattgcaca

SEQ ID NO: 3762 - DNA, 162 bp, Bos taurus
  Clone ID: 46-LIB3058-018-Q1-K1-D6
gctgggtgatgggtacatgagggttcatcagactgttctctaattttgtgtataactgatattttctgtaataaatttcttttcaaaggaatgaaaaaggaagccttaattttccttgtaaccattacagatgtttaattagaaattagaaatctcctcacc

SEQ ID NO: 3763 - DNA, 304 bp, Bos taurus
  unsure (164): Clone ID: 46-LIB3058-019-Q1-K1-D6
cttccagtccttacccttcctgggtaaggggtcttcccccgagctccagggggtggaacccaatgtttacatgttcttctgtctctgccccaaccctgtgcggcgctttgaggaaccagaaaagaacctgctgttgtacctggaaaagacaaagtgaaaggcantgtctccggtcgcacacagcatggactgtactgccactcagagatacgtggtttgaaaggaacctaatcagggaccgtgattttcataggtatgtgacaattgaggcctttatacaaggtccttttataggtcaaatagt

SEQ ID NO: 3764 - DNA, 252 bp, Bos taurus
  Clone ID: 46-LIB3058-020-Q1-K1-D6
acgaaaacatcataacattaaaaagcaaataaaagaccagaggaaacacctaccatacagaaaaaaattatatccacaatataaaatgaaccaaggaaaacagctcaatgataaatggacagagaatataaatcggtaattcacagaagagggaacccaaatgtccaataaatatacaaaaagatattcaagcttgttaatcatcagaaaatttaattttcaaatgttgttacagtatcccttagattggcc

SEQ ID NO: 3765 - DNA, 436 bp, Bos taurus
  Clone ID: 46-LIB3058-021-Q1-K1-D6
atttcattttaaacaaatggctctctgctgtgtgctgataaaatactgggcatgaggtaataagagctaaaactaaaggaccacaccagggccaattctatgagatctaccttccaaaatgtggggtgtaggcacgtaagacattcaggtagaaatatccagtagacaatgttgtagaatttggaagggagatccagactggagtagagatgggagtcatcagcatttaggtggtagttcaacccaaggagtggcagtcacccagagagacagtagagtgagaagaggcctgaggacagaactcttaggtctatctgtatggaaggggtcagagacagctaagcttgcagaggagaatgaggaagagctgcctgacaggtgagaaatactgatggccaataatgttgcaaatatcaggttggaaactactcaagga

SEQ ID NO: 3766 - DNA, 359 bp, Bos taurus
  Clone ID: 46-LIB3058-022-Q1-K1-D10
gggacaggaagtgggagcctgtcaaggtccaaatgggtggtggagaacaccagatgggaggttcacaggctcaccctgccctccgagaacagagcagggagtcatgtcatgggtcacttggccccatttcacttgaccaggttgaggtgcgcgagcatgactctttagaggcaggagcccatgggccatggcagagctgggtccctttcagcttggctggaagtactgaggacgtggatgaaagggtggggctggcgctggcagggtagagcttctttgggcagttggctgtgacctgtccctgtggatttaatcctgaccttcctttgctctgtccatgttctttcttcagctgcctg

SEQ ID NO: 3767 - DNA, 450 bp, Bos taurus
  Clone ID: 46-LIB3058-022-Q1-K1-D6
cggacgcgtgggtgagcctgagttgcacgaaggagtggctctgccagcctcttcaacttctacccacataaccagcgcccatgaaaacaccccatttgaaaaatggacatgaatccagcataaacaggtaggaattccaggcaaaatgtgtaagtgcttggcgagacaatgcatgcattttgaaaagaaggactatgagaaagaagcttgaaaggcagcaggtatgatgtctgagtgatttggaaagtgattttatcctgtgaaataggtggactgtattaaaggacttacgtaaagggagtgacagagtctggtttatgcgtcaaaataaattgaagaggaggaagcctggaggcaaatgacaggatcagaggttgtcacattaatggaagatgaaggtggtcgtggaggtgtagaagaagagatggctggagaacaagatgtctggga

SEQ ID NO: 3768 - DNA, 404 bp, Bos taurus
  Clone ID: 46-LIB3058-023-Q1-K1-D6
ctctggggtgaggaaggatccccgagcagcatctattatgaaacctgaggatgtgcaggggttacccagaaagcctgttacaattgctaattcccagcttccacacccagagatgctgatctgatagatctggggtggaactcaaaaatctgcatttttaataagttcccaggtacgtagtggcttgtgaaccatactttgaaaaaagatggtctaagacagtggtctaagacagaagctctcccccttggctgttcagtggaaccacccggaaagttgaaaaaacccaaatgtccagatcccaccccagacagcttggggttggaactcaaacatcagtagtttttaaagctccaaaggtgaattcaatggtgcaagaaattttggaggttgggaagctggac

SEQ ID NO: 3769 - DNA, 254 bp, Bos taurus
  Clone ID: 46-LIB3058-024-Q1-K1-D6
ttgacgcgtgggccgcgaatgatgacggtggcatatcgggcaaccagcctgcgcacagcaatgtctagcacttaacctgaacgatgctgcgtcaaatgaccgagctgctgagtacaccgattgaagggcaataaataatgcagggaggtgctgtttacttgtaaagaggactgcttgttaaggcgtattagtaagcgattctattaaatgcgtatatacagaagagatagtatataagcaaacaactaagtggt

SEQ ID NO: 3770 - DNA, 428 bp, Bos taurus
  Clone ID: 46-LIB3058-025-Q1-K1-D6
gttattctctcacgtctattcttccaagtaaatttaaaatgttgccaagtcctgcatccttctgccctcctctcaccccaaatattgggccctttcatcacaggtgcaaacgtcatgctgccattgtaagcactgtccactccggctcactaaatagccctttaaggagaaataagaagggcatcctagctcttgagggaagcctgatactcctcccatcatctcacctgtcccctgagccagggtgttgtcaggagaggccactgagcccccacccaatatcagtgtgggcccccaaatcacccaccttgcctgtgatggggtggaccctccatccgccccagtccaggtgagatagaaggttctctcccagactcagagctaccagaacgtgtaccccacttgccaattctcctcatggagaaatg

SEQ ID NO: 3771 - DNA, 342 bp, Bos taurus
  Clone ID: 46-LIB3058-028-Q1-K1-D10
gttctagatcgcgagcggccgcccttttttttttttgcactacttcagttgcgtcatgggcaatctcttgaccaagcctatttttaaactctggtacagtatcattttatacatattcccagctgcagaatcggtattgcttattctcagcaagagagattgtttgcatggaaagattaatagcactgattagctttctaatattttgcactttttgaaatgtttgctttttatgtgattatatgtaaaactttagtaaataatgaaataaaaccaatttgaccagtacaaataaaaaacccaattatttttctattaaaaaataagggctgcccgatttaa

SEQ ID NO: 3772 - DNA, 278 bp, Bos taurus
  Clone ID: 46-LIB3058-028-Q1-K1-D6
cgtgtaactgcttcctccccttggccctaccccctcccttggccttggcatgccctgggccaagtgagccccactggagccaaggacccaagggtcctgctcctggaggcactgaggtccccagggctgcgggctctggaagctgggacggcagcagagctcctagatgtcttcttggacctggaggcccatggggaagagctggctgaggccatcgctgctgggaacccaggagcacctctccccagacgggcagccgagctgcgggaagccctgga

SEQ ID NO: 3773 - DNA, 483 bp, Bos taurus
  Clone ID: 46-LIB3058-029-Q1-K1-D6
tccgtccgaattccggtcgaccacgctccgaaaatctaatacacataattccattagtggttgagggaagcaaataatggaatcatcagtttgtcacctgactgtaaggttgttctcttgaacttaacatttttagttttaggcaagggccagaaatgtggcagacatgatttttgttacacattcttgtattatatgtgactcagttgcagacaagatgtgtctgtagtcagagacccttgtggaactgaactggaagacgtcttgtagtgctccattgggtgaaaccaatggtccatttttgtttgtttctacaaaaatgaaagtggggaccatctcgaaaggcagtgagaagacggattctacagcactgctttcattcaattgggcttttggcactccattcgaatccagaacctcacctctagctcagaccaagaattggcacttctgcttgaattcctggaaagaattgctggtttt

SEQ ID NO: 3774 - DNA, 275 bp, Bos taurus
  Clone ID: 46-LIB3058-030-Q1-K1-D6
ctcaacagagctgccatccagagagcccgagggtcagctaggattttgttttcttctgatttcccacatacttcctggtgaaataggggaatttcgtaggaagtagccagtagacagacaccaccttgtgtctatatagcacgttggtgttctttctgccatttattgtagatctttctactgaacagacgttttttcagagacgtgtgtaacacacagctgtgcacatgttattgagtggcataacttgctctatatccatttttttgggtgtg

SEQ ID NO: 3775 - DNA, 200 bp, Bos taurus
  Clone ID: 46-LIB3058-032-Q1-K1-D6
cacatacccgtctccccgtattcctcgtcaatggctgaccaactctttcagcgcgagccctgggaccccgagcagcttcgcccggaccccgactctgactccgaaggcctgtttgacaaggctcctccggaagagccccccgctgtccgtgggcccaagtcggcttgggccgcggtcaggaaggccgatcgtctcactgt

SEQ ID NO: 3776 - DNA, 428 bp, Bos taurus
  Clone ID: 46-LIB3058-034-Q1-K1-D6
cggacgcgtgggctggtaggagaagtctgtttggtggagtgaacgagggccgtgaagatgacatgctggtggactggttcaagctcatccacgagaagcacctgctggttcggcgggagtccgagctcatctacgtcttcaagcagcagaacctggagcagcggcaggccgacgtggagtacgagctccggtgccttctcaacaagccagaaaaggactggacagaggaggaccggggccgagagaaggtgctgatgcaagagctcgtgaccctcatcgagcagcgcaacgccatcgtcaactgcctggatgaggaccggcagagggaggaagaggaagataagatgttggaagccatgatcaagaagaaagagttccagaaggagactgagcctgagggcaagaagaaaggcaagttcaagaccatg

SEQ ID NO: 3777 - DNA, 217 bp, Bos taurus
  Clone ID: 46-LIB3058-036-Q1-K1-D6
cggacgcgtggggaagtcagttcggtatccagggatacgctctaccgaattggtctgggagtgatcaccttcttgaaccatcttgctcatatagttacttgtttattacttgggaccccacctccttctaatgtaaactccacaactgccatacttgtttactgccacattctaagctcccaacactagtaagatctcaataaatgcttgttgactg

SEQ ID NO: 3778 - DNA, 425 bp, Bos taurus
  Clone ID: 46-LIB3058-038-Q1-K1-D10
gaagtattagcatcttagacatattttatgtgaacaagatgccatagaggttccactgaccatatacttttatctgtttcctagctttgttgttgctgtttagttgttatgcagttcttgggttcaaagtagattatatctattcctaaagttgggtgagggtggtgtagctttcacacaaatgcacttaaatattcataatttttagtcatcacaccctgtgagatacagttgtgaagttgataagataatgaacttgacttcccaagtggaaagtgttactgctatttctagctatcctctgatttgctgtgtggccttacgtgtggttacttttttgtgctttaaaaaaaaattcttaaagtagaattatacatggcaactatccattttacagatagtgacaaaaatggtagaaaactagt

SEQ ID NO: 3779 - DNA, 387 bp, Bos taurus
  Clone ID: 46-LIB3058-040-Q1-K1-D6
gggccgccgccgctgccgccgcttcataccccgccgccgcagggtgtggagcccgccgcctgtcgccggctgcgcgtgtgccgcagccgccgcccagcctccgtcatggacctgttcggggacctgccggagcccgagcgctcgccgcggacggatgctggctctgggggacctttgctttttgacgatctcccgccagccagcagtggcgattcaggttctcttgacacttcgttatccgaggaggtaaagaatgaagggaaaggagcaaagagaaaagcctctgatgaagagaagaatgggagtgaagagcttgtggaaaagaaagcttgtaaagcctcttccgcgatcttcagcctgaaaggctacctggctgaaccgaagggc

SEQ ID NO: 3780 - DNA, 425 bp, Bos taurus
  Clone ID: 46-LIB3058-042-Q1-K1-D6
atatgttattgtgaagtacctttttgtttatatcaaaaactcaggttaaaactattctggtaagtacagcttgaatttcaagtatcccatgttaccttcctatattaaaatatctacaatctgtgtgatatagttaattgataaacatttttaacctgtgaacacagaaatttaaataggaatttactattttttgtaatgacttgctattttttcactgctcattttgttcttgttattttgatatacaaagtaccagactttttgcacctgagttttttagtgaaaattatttttacatgtaaaagtactatctttaatcagttgcatactgcagaaaataatagtctatcttgaattgccctttaaaaacactaaaatggtggtggtgttgacacgtttacagttcatgtaggaatcttgca

SEQ ID NO: 3781 - DNA, 402 bp, Bos taurus
  Clone ID: 46-LIB3058-044-Q1-K1-D6
ctgactgtttctattattatttcattttttaggcaaagtatttgatacatgattcattgtgcacataaatgaaaatcatgattatactggctttcttaaattatactttaaagtaaccaatgttttaaaattggaagataatactcaaaagtcaagttcaacatctttttttaaataacatattccagcaatcaaaggttgttgtgttttacagggatcagttagttttaacagagaattaagttgcttctatttatcaaatcaatcaaatcacggcataacagtgaccatttctctctcttttgatttatccaacgtttgcatgtcttcaccccgaattcccttcccttaacattggcagaactcttaatgggttaaaaatgctcttccaatccatatttt

SEQ ID NO: 3782 - DNA, 435 bp, Bos taurus
  Clone ID: 46-LIB3058-045-Q1-K1-D6
ccgacgcgtccgcggacgcgtgggtattaagcagaagtagtgttatatgcattctaggaatttggaaattctgaaaaggaaaggaatcaaagtattccacagtattcattcttgaatgtcttaatgtaatcccattcgttatcttaattttttatgtatatttttaaggctagccataactgtcttgcttttctaccttatcagatatttcccgaatgcctactatatgcgagacactgctctaggccccaggctacatcagtcatagagcccagatgttagctttccttcaggttgcctttatgctgtcctgtgtgattgactccatactttctgcagataatggttttctcattaaaaaaaagataaatgcatatagtgataccaatcctagtaatcagtgaaactatcagcacaaacaaggggcggccgctc

SEQ ID NO: 3783 - DNA, 415 bp, Bos taurus
  Clone ID: 46-LIB3058-047-Q1-K1-D10
tggaatcgtgttattgtacagtgttaattcgttttatttccaaatctggtccatattggggactcaatgctagataggggtttagggttaggagtagtaggggtaggatgtgggagtggtaaagttactaaattatgtgcataatatatgtagtagtaaattcctatagtggagacatgttactttctttgacactataactgagaaccttcttggcttatcccacaaagcactgatgaataaccattggcaatttgtaactagtgaggttaattttatatgtaaattagtggagtgtattcatttctaatctaaagaatcacacatggtaggtacaatgactaagaatgtactcagcatgtatcatttctcaagagctacttaataaagtatctgtggtcagtgttaaaactta

SEQ ID NO: 3784 - DNA, 426 bp, Bos taurus
  Clone ID: 46-LIB3058-049-Q1-K1-D10
cttacctttccggtgcctgcttccttattgctctcctcacactccacgcagattctggcgctccattcattggcatccggtggcagcagagtctctgtccagggacttgaaggtaaaccctgaagccagaatggaggcccctcagtgctggaggccagcagggtggatgtggggagaaagtgagcttctggtgccacacagtcatccctcggctctctcacccgctcggcacttgtgttgcttaggctcccaggcggttgagatcacctcagagggccaagtcgtccttttcttctctcaaaagatcaggaaacgtgagaacccctgcccccctggacacattgggtgtggctgtcaaagagtgctctgtgcctggaacaccagtctgtccagcagggttgtctgtttcacctgtgggcactgctg

SEQ ID NO: 3785 - DNA, 391 bp, Bos taurus
  unsure (343): Clone ID: 46-LIB3058-052-Q1-K1-D6
gcgggccaggactgcctggtgtccactttctgcagtgggagtcgccggggctccggtggcctgagcacgtgcccgccgcaggtacttcctgtggcgcctcctggcgctggcagcaggcctgggcttccggtcggagccctaccactggccgctgctcgtcttcctgctgcccgcctgcctctacccgtttgcatcgtgctgcgcgcacaccttcagctccatgtcgccccgcgtgcgtcacatctgctacttcctggactacggtgcgctcagcctctacagcctgggctgcgccttcccctatgccgcctactcgatgccggcctcctggctgcacagccgnctgcaccagctcttcgtgcccggcgtcgtactcaattcttttctgtgc

SEQ ID NO: 3786 - DNA, 168 bp, Bos taurus
  Clone ID: 46-LIB3058-054-Q1-K1-D6
gcgagcggtcgcccttttctgtatgctttatgcttttttgttggttctatgtccctggtcatatgtatttttttttttagattgtcttgtggtactgcccaaaaactaacactatcccctgatggactgattcttgacagatcaagctgacccagacgccctcaagag

SEQ ID NO: 3787 - DNA, 429 bp, Bos taurus
  Clone ID: 46-LIB3058-056-Q1-K1-D10
atcgcgagcggcacggctctaaaattctaggcaacaattagatagctttctctggttctatcagagaagaagctacaaagtttcatttcttactttgcacaattcctgcatcctattactcctgaaaatttatttgacaattgagtatctatactgtcttctgtgttaagcatggatcatcatgattttagagtgctattttcattatttggctctctttttctattaatagtaataatatgagcaataggtttcattttcttgaatgcttaatatatgttaggcacttggagaaacatctttgcatgacttacctcatttcatacttgatatgcttcatggtataggtattattagccccattttaatgatgaaaatactgaagcccaatgaggttaaataatttctatattaaattattatattata

SEQ ID NO: 3788 - DNA, 181 bp, Bos taurus
  Clone ID: 46-LIB3058-058-Q1-K1-D6
cgcggcgtaaacttttgtacctagatttaatttatacaattttataatataaaattgagatggggttaattataattacagttagttttaaatattaattaatagttactttaatattatataaatgatcggatatttattttaatttattaaatataaaaaatttattaatatattaata

SEQ ID NO: 3789 - DNA, 295 bp, Bos taurus
  Clone ID: 47-LIB3058-002-Q1-K1-D4
cccacgcgtccgcccacgcgtccgcccacgcgtccgcggacgcgtgggcgcaagcggccgctcgcgatctaaaactagccgacgcgtccggcctccaaaacttcgcatcaaccccgtgacactcagacgcatccggcctgcccctactagcgctcctgaccaaccccgacgagcggcgatgaccggcacggtgtccaagctggcggcgccccgtgctgcggagccaccgctccggccggcgtcccttcgcgccgtcgcaatcgccttagccccctccgcgcgccgggtccgcgtc

SEQ ID NO: 3790 - DNA, 433 bp, Bos taurus
  unsure (402): Clone ID: 47-LIB3058-003-Q1-K1-D4
ggccgcgctgacggcggagaactttgcagctctccagagcctgctgaaggcctcctcgaaagatgttgtcagacagctgtgccaagagagcttttccagttcagcccttggctccaagaatctcttggatgttacgtgttccagcttgtccgtgacccaggaggaggcagaacaactgctccaagccctgcaccgcctcaccaggctggccgtgttccgtgacctctcctccgccgaggcgattctggcactctgtcctgaaaatttccaccaaaacctcaaaaacctgctgacaaaaatcatcctggaacacgtatctgcttggagagctgaagcccaagtgaatcagatctctctgccgcgcctggtggacctggactggagggtggacatcaaaacctnctcagacagcatcagccgcatggccgtcccc

SEQ ID NO: 3791 - DNA, 420 bp, Bos taurus
  Clone ID: 47-LIB3058-004-Q1-K1-D12
gcagctcctgcccctaggggctgaggggagaggaccaaaagctgtccctcaacctggcccccgatcccgaaccccccgccaatactgtgaaacccccttcctgaccatcccggtttcctggtgtggaccctgaagtgggcccaaggggtcccccagggaaaggcctttgggaaggaagggaccaggggcatccttgggccaaactctctgcctctcctgtccactctttctcctccctactcctttcttcagaagggctccttcccaggaggtattgggtgctagacaccgctgtccaattcggcaggttttctttccttccgcggcctaattcagaccttgaattaccggaccagggtaaactaccaaggggttttaaagggtggaatatggaaaataaggtttgccatttaaccggtt

SEQ ID NO: 3792 - DNA, 320 bp, Bos taurus
  Clone ID: 47-LIB3058-006-Q1-K1-D12
acgggaagctggcgcgtatggcagccgaggagcacactctgcaggacactggacaagacagtaaatattcaacttttaatgctgattaaaggagtataggtaaagaatacgtaggtatacataattggtgagacaaatattcactttatttatctgttatatattattttgtaatttggtaaatactatccagttttgtagttgtccttgttgatttgtgtgatgttaaagtattagtagtaactgccaggaaactgtcattagggagggtgtagtcagctgctgactgtactgtgagggatgattgaaatctagtgcta

SEQ ID NO: 3793 - DNA, 255 bp, Bos taurus
  Clone ID: 47-LIB3058-007-Q1-K1-D12
gtgggggctgctccctactggctgggttcctggacacaggagtatctctgtctctctgtggcttcctgccttgctagcctgccccaccaggtttctgggagctcaagctgaggcccagaagggtcctgcctgaccagcaaccactctcaccaattatgtgactccccatagtccagacacagtacttgcctgttatgcagtactcgggtactcaagtagaggcctcagacgaggcgtactgccctcagatgccaa

SEQ ID NO: 3794 - DNA, 255 bp, Bos taurus
  Clone ID: 47-LIB3058-007-Q1-K1-D4
ggccgtcggccccagcgctgcatcggcagcacatgtgagcagctgaagcacagcacctgatgtgaatggttgacctgcactttgtgcttaaaagaatcaacgcctagacacggcccgagccctgatcgtgcctaggccactgaggaccaacgcattcgatacagactgctgaacagtcacagtcatattcggatcactactcttggagggtcactggttctttaccatgtaggccgatgcacactacgtttatat

SEQ ID NO: 3795 - DNA, 411 bp, Bos taurus
  Clone ID: 47-LIB3058-008-Q1-K1-D4
ctaatgatgaaaacataccgagggtcaagataaagcagtgacctattggctgaaggtctgattcatgacttatgataaagattgggtattttaccagtaaaggcagaaatctgctggcattttgataaaaagaaaagctaaaattaaggaatgtagcaattaactaaacttcacactacaaaactgaatgccaaagtgttttatggctcatcagtcggcaactttgacccattgaacatcagtgtgtgtgtttggattgaaatgctaaacacacagacccaggagagatatggcatgagagtagaatttggaattaaaatggcgatattgcccactggccagctgtgggacttcttgaccctgtcaagacccctctccgtggattaaaagggctggatgatatccatctgt

SEQ ID NO: 3796 - DNA, 427 bp, Bos taurus
  Clone ID: 47-LIB3058-010-Q1-K1-D4
cacaagttgtgacggttgactaaatacctcgggcaaaagcattgtaatgggtcctttgaaatgtgagatccacccttttgtggaattcataaactctgacacttcaagatatgccctgactgacctatgtatttggtatcctgctgagtataatatccataactgatcaaaggagacatattctagtgttacaaaggacttgttgattctattaaaaatagccatattttgagtaagcaatcattttacagtgtgcccttgagagaaaaagacattgtaacttagagattttgtctactggaaaagatactgccaaaagcattctacttagacttaccaaaaagaccatactaagtactgttaaccaagccttgtgccaccatactttaaggaatagactcttggatgcctttgacaaacctaatga

SEQ ID NO: 3797 - DNA, 209 bp, Bos taurus
  Clone ID: 47-LIB3058-011-Q1-K1-D4
tcggttatagatcgagagcggccgtccttttttttttcatgttatttatacttatatattggatgggtttattagataatatattaatattacaactttaactgttctacataaatatatattatacttgtaatacataatgatacttaatatgttgatgataaaaaaattttataattaaaatataggctctgatataagatttatat

SEQ ID NO: 3798 - DNA, 424 bp, Bos taurus
  Clone ID: 47-LIB3058-012-Q1-K1-D4
cccatcctctgtgaacccatacctctctagatggagcaggtggccactggtgcctcatactcagtacttaaaaccactacatcccagctacctacatagctgtcggctctgaatcatagctgggcagttttcagtctcagaaccctgaccctgcaggtggcgttcagccactacctggaccgagctgacagatgttatcattttgtgtttctgcatcataatgtttgtctaaggtttggactgttctgtgggtaaccttccctcatcatagtgttcgttgccaattccatcacatggttgtcgatcccatcgtacgaagtcattgcaaggactctggaaactgctgccaatgaccgattcctgactaaccagccaccttttctttctcttagctccacgtcagccctgagaccagactcaagca

SEQ ID NO: 3799 - DNA, 291 bp, Bos taurus
  Clone ID: 47-LIB3058-013-Q1-K1-D4
tcgctagtctagatcgcgagcggccgcccttttttttttttttgtttttttttttttttttggttatatatggatttttaactttatataccacttgggtaatatatgatggaattctgctggcaaactttatatcctctactttatccactattcatttgtctctactacttaatggctcataatccatggggtcgcaaagagtccgactggactgagtgactttcactttcactttcactgtgcctcaaatggttgacctgaattgattacatgatctgattatgttct

SEQ ID NO: 3800 - DNA, 98 bp, Bos taurus
  Clone ID: 47-LIB3058-014-Q1-K1-D4
gacaggaccgctgtctagcggttgtgttaggagcctggttgagtttgtgtggcttcaggccttttgtcagaggtgctggaacatttgatgtaatgcat

SEQ ID NO: 3801 - DNA, 441 bp, Bos taurus
  Clone ID: 47-LIB3058-018-Q1-K1-D4
acgcagtgtctgaggaaaaatgacctgtcttgactgccctgtgttcatcatcttaagtattgtaagctgctatgtatggatttaaatcgtaatcatatttgtttttcctgtatgaggcactggtgaataaacaaagatctgagaaagctgtatattacactttgtcgcaggtagtcttgctgtatttggggaattgcaaagaaagtggagctgacagaaataacccttttcacagtttgtgcactgtgtacggtctgtgtaggttgatgcagattttctgaaatgaaatgtttagacgagatcatgccaccaaggcaggagtgaaaaagcttgcctttcctggtatgttctaggtgtattgtgaaatttactgttgtattaattgccaatataagtaaatatagattatatatatatctatatatagtgtttcacgaagct

SEQ ID NO: 3802 - DNA, 403 bp, Bos taurus
  Clone ID: 47-LIB3058-019-Q1-K1-D12
aaaaaggaagatctcgctaaagttaaaataaggaaatgagttcacacatgaattaaaggtcatgtaggagctcgtttccttaaaactactataatgggttctgtgacaaatggtggtatactagcactattatgtaaggcttatataccatagagtttttaacagaaggtaatgagcttcttctgagggccattagtagcactggacttccttaaatttagattcatgattgtaatgggtgctgcaaatgcatctgcacattgcaatatgatgagatgaattgttaaaacgtatatacaaacagaaatgtacacttggttaaaatctgctcactctttgtattgatattttttttttaaaagatttttatttcgtaaatgtaaaatgactacctaattttttg

SEQ ID NO: 3803 - DNA, 246 bp, Bos taurus
  Clone ID: 47-LIB3058-022-Q1-K1-D4
gttctagatcgcgagcggccgccctttttttttcaccattcttccccatccctgttattctttaggcttgggcactgtattcttttccattttctttttcatctagtcaaactgcaacacaatcacttcatgacaactctcaaaactcactgttcttctcgtccacacccctgtccccaacatatgcagtcctaaaactcccctttaaaaactcatcggaaaacaccctatatctggacacgatca

SEQ ID NO: 3804 - DNA, 405 bp, Bos taurus
  Clone ID: 47-LIB3058-023-Q1-K1-D12
cggacgcgtgggcggtatgcgtggggatttatcaaaccacccaccttccgtttggaggagaggatgtaaagttgccagcaaggaggcacctgaaggggtcagggtggctggggctgggccatgtgggtcactgtgctgggcacctgtcactcgccgactgccatcctgctactgagagggtttgctctgttttttcttcacctgtgagaactataaatcccgttcctgaagtcttaccatgcagacttgtcataagggaactctgcagagttgcttgttttcagtgaagacagaagcatgtatggtgccaggtgccaacaccgtggagagaaattctctggattctgatgtttttgctcatgagtgaggaaaataacgacttttcagttccagccttgagggtca

SEQ ID NO: 3805 - DNA, 432 bp, Bos taurus
  Clone ID: 47-LIB3058-024-Q1-K1-D4
aatcagtcctgcatacgagtaagcggtgtcttactgaagacttccatgcatcgcatggcagagacaaactggtaaggaacatttctctctgcgttgaagaggatcgaaccgggccagggttagaccagctgataggaacgattgagagacacatccaagtgatgctcatccatcgccattggacttagggatgcaggcctgattctttgcctacttttaaaaagctacttcttctgtttacttattcataaaatggggatcacatttgttcacattatagagttgaagcaataattaaataagttaatatgtgcaaaactcttagtagaaagcatcattagcgctgccaccgttgccaccaccatgaattgtatactgatttaagctttgagcacttctataagccattgccaggagacagatagaaatagt

SEQ ID NO: 3806 - DNA, 434 bp, Bos taurus
  Clone ID: 47-LIB3058-025-Q1-K1-D4
gctgtgtgcagatgacggaattctttgagtttctcagggctggtgttaccttgtccacagcctgcgtccacactgcctgaacaggttggtagagagctccaggtgtgggatctccctcagataccttctgccccactacctcttcactctcctgggagcacctctattgcttatgaagactaaggatattatttcttaaggaagtggaaagagtttattttaattaaaaatccacagcctgggcagaaacatttcctatcaacataagcaaaaatagcacatgtggtcccttttctagagttactttcctgtgactctcaaaacatcaggctctttaggggcttcaggtataacaccttggaaatccagcaaacctttgcagataagaggtgagcccagggagcaggagcagaaatgattggttctggtgcttt

SEQ ID NO: 3807 - DNA, 410 bp, Bos taurus
  Clone ID: 47-LIB3058-029-Q1-K1-D12
cggacgcgtgggcggacgcgtgggcagacagggagtggacactgtgagtgcaaggccagtgggaagacaggaagtgactccagcagaactggcagcagcagactgcctccaggaaacagcaaaaccaaggcagaagatgtgaagagagttcgggaaacagggctgcacctgatgcggcgagcgctggcagtgctgcagatctttgccgtcagccagttcgggtgtgccacaggccagatcccacagcccctgtggccgaggggccacggcgacagggactactctcccttgctaaagaggctggaggtgtcagtcgacagagtgaagctgcttgccctgaggcaccaggcgcacgaccacgtcatcagctccgccagactccaggacctctatctgggaggcaaggatga

SEQ ID NO: 3808 - DNA, 259 bp, Bos taurus
  Clone ID: 47-LIB3058-030-Q1-K1-D4
cggactcgtgggatacatattagtaaaagaatctggaaacattttaaaaacctgtacacaatgttgaatcctgattaggaagcagtttccaactgtaagaataaagagcatgataacttataggtgttttttactcaagatttctgccttgattatatagaactttctaagaaatacttgtgtatgtcattgtttttaaactggaagaaaaaaattctggtgtttcatgtagtgtttaggatgtccttcactgagttga

SEQ ID NO: 3809 - DNA, 199 bp, Bos taurus
  Clone ID: 47-LIB3058-031-Q1-K1-D4
gcaaatttctatttccagaagtgacgacacatatttgagttgctgtttggtctgatggccttggtattgaaaggtaagagtcaaagtcgctggtcataggtaagtcatattttcacaagcagtatgcaagggtaagcccaaacactcaaggatgtagatgtggagatcttgctctatgataatgcagataggtttcttt

SEQ ID NO: 3810 - DNA, 57 bp, Bos taurus
  unsure (48): Clone ID: 47-LIB3058-032-Q1-K1-D4
ccacgcgtccgagaacattaataaacgtctcttgtgtatttatagctntaacatatc

SEQ ID NO: 3811 - DNA, 424 bp, Bos taurus
  Clone ID: 47-LIB3058-034-Q1-K1-D4
tcccggaccgacccacgcgttcgctggaaacgtccctgctctataccccatctactcccactgccctcccctctggcctaggttggccggccactcatgatttgcgcggtgaatttcagagaagataaatgaaggcgtgtgtcagaaaaaaaacattcaagcggtaatgggacgcacaccaacgaacaacagatgctgtacgactgactgcttgcacactatccttgtgcttactacccatggatacgtgcaagtgtccctatctttaaaggctgcttttaggacgaaggtcacacatctagaccgcaagcagacggagctgtgactcagaggggctttcttgcacaaacgttgcatggaggggtacctgtacggacttactggctgccctgagccacttaatctagctgtgttacaggatgca

SEQ ID NO: 3812 - DNA, 222 bp, Bos taurus
  Clone ID: 47-LIB3058-035-Q1-K1-D4
cggacgcgtgggtttttttccccctgttatcagtgataaaattgattagtagtcactgggtttgggaaacctaaataaacacccactaccaccctgagggatggctccctgtttcatagagtaggttagcacttaagttacagttgctatcttaaaatagtaggtgctacagtcattttttgctttcattagccattaattataagaaataaaagatgaagt

SEQ ID NO: 3813 - DNA, 433 bp, Bos taurus
  Clone ID: 47-LIB3058-038-Q1-K1-D4
tcgcaggaacttcggctcgtccgcatcctgtcttagtaccgtgatggttcgcgttggaggtgggtggatggcgctcgatgagttcctagtgaaaaacgacccttgcagggttcatcatcatgggagtaaaatgttacgctcggaatcaaactcttcaatcactactactcagcctactatagctaaaggaaggacgaacatggaactgcgggagaagttcatcttggcggatggagccactcagggcatggctgccttccggccgcggggccggagatccaggccctcatcccgggcggcctcgcccagtcggtccacgtccgtgtccggtcaggccggccaggccgtcttcccgcaggtccctgccagcagcacgcctaagattctccatcctttaacacgcaattatggtaaaccctggttgacaaacagc

SEQ ID NO: 3814 - DNA, 323 bp, Bos taurus
  unsure (39)...(40): unsure at all n locations; Clone ID: 47-LIB3058-040-Q1-K1-D4
tcgaagaagatgagtgggctgtttgttagttgatcagcnncttaaaaaagaacccagcagagggataattaaataaataaattctaaaaccaatttttttttaagtcaaacttggacatgactgagcaactacactttcactgtttaaaaaagaaaagatccctctggctgctcagcaaagaatggaccagagaggacaagagaccagtgaggacgtgactgcagtggtcaaggcagttccaccccaggatcagagatggaaagaagtgagaagattcatttgggggacacagcagagaaagacttgatgggtggagaaggaa

SEQ ID NO: 3815 - DNA, 404 bp, Bos taurus
  Clone ID: 47-LIB3058-042-Q1-K1-D4
ctcagatcagactggtttctcttatgtaaatgcacacatgcagaaacacagtcgattttacatgcccataaagacatttgtaaagaattcaatttattatggtctgttgtataaatgtgtatctaggcactttactataaactggagtttgacctcatagacgttacaagttgatcagtcatttgacctaatttgtggtagctatctgtatgttttgcaatctttatacagataagctttccaaaagattaataaagaaccatcctgctgttttgaataagtctctccagctgtggaaaagacaacctatggtttctctgtgctggtgttcaagagggagaatttaaacagctttaaagggctgcatgttgagtttactcctattaaaaaataagagtccgact

SEQ ID NO: 3816 - DNA, 229 bp, Bos taurus
  Clone ID: 47-LIB3058-044-Q1-K1-D4
cggcattaccggcgcgacccacgcgtacgctgactgcagctagaacttttccaggtttttagaaacacgtagtacacgtgggtaatcgtgaacatatagggtacacaggagtatactggatgacttaacttgtgatttgaagtagcgaatgatgcgtacatggtaccagattcaccatagagagatgcaacatcttttattaaataacatattccagcaatcaaaggtt

SEQ ID NO: 3817 - DNA, 392 bp, Bos taurus
  Clone ID: 47-LIB3058-048-Q1-K1-D4
ccggtggtgtcgctgacacgatcgtgattttacagagaaactgtgttcgagtcgactttgccttgataactattgtaaacactttggacccccaggggcagcccagggcgctcgagtccagcaggtgtgcagggcatagactggggtctcccatggttcccctgccccccggcttcaggaggcagagctgcccctgctgaggtgccggggccccgggcgctgaccctgcagcttgagtccttttggcgacggtagcggccgaggggtggtgtctgagcgggcccaccactgccgtccactgcacgccggcccggtggtgtcgctgacacgatcgtgatgttacagagaaactgtgttcgagtcgactttgccttgataactattggaaacac

SEQ ID NO: 3818 - DNA, 454 bp, Bos taurus
  Clone ID: 47-LIB3058-052-Q1-K1-D12
gaaaattggtgaggagtctataaaagggagaaaattctaggcaacaatttgatagctttctctggttctatcagagaagaaactacaaagtttcatttcttactttgcacaattcctgcatcctcttactcctgaaaatttatttgacaattgagtatctatactgtcttctgtgttaagcatggatcatcatgattttagagtgctattttcattatttggctctctttttctattaatagtaataatatgagcaataggtttcattttcttgaatgcttattatatgttaggcacttggagaaacatctttgcatgacttacctcatttcatacttgatatgcttcatggtataggtattattagccccattttatagatgaaaatactgaggcccaatgaggttaaataatttctatattaaaatattatattatatatgaggttaaataa

SEQ ID NO: 3819 - DNA, 446 bp, Bos taurus
  Clone ID: 47-LIB3058-058-Q1-K1-D4
cggtcgaccacgcgtccgggaaagctttctggcaggtggagaaaataagataggagatcgatgactttccatgcttttatatttggcagtttacaagtctagacttttcctactatggcaatcttttttaattctttggaggtaacacaatattttggagtcttaagaatttgattttataccaataagaaataaaaattagggatctttcctgtagtatatagttttactattttaaagagatctctgaattttacaagagaaccaacattccttagtggcaaaactctgaaggttgatttgggaggctttttgctgcaggatctcaaaaaaactgggatgattctagttaaatgtttcttaatttttaaacttccatcaagtcaatacgtaagctatattttgtaaagagtaaatcatcctttagtatgctgcatgtaaagatc

SEQ ID NO: 3820 - DNA, 417 bp, Bos taurus
  Clone ID: 48-LIB3058-001-Q1-K1-D12
ctgcggtaatcaaactgcgcagctctggtttaaggtcagactcagacctacaaagctgagcagtgcatacagaaatagccctcagcgtacgagcaaggcgcccgggctcaggctcagtggacggctgtaactgcgagtattggtgactatgggcttagcggggcctgttgtattgttattcgacaatctactcgttgtgatcagagtctcagactgagagaggcgatcgaaatgtaggctctagcgctactgtcagctaccggtatggagccctcgcagttactgatgagcctgtgtgctgcgcttgcagctcatgatgtcagatacacattatataactcataattcattctttctctgacgactgagcctcatggagatcatttgctcgctgggtagtggctgcaaacatgcatt

SEQ ID NO: 3821 - DNA, 292 bp, Bos taurus
  Clone ID: 48-LIB3058-001-Q1-K1-D8
ttctagatcgcgagcggtcgcccttttttttctcatgttgagattttatttttccctatgaacgtgggaagtgcagaatttattttatgatatttgcttgtgttgacgcatattcattcactcatttgcaaacatgatgggcactggctgttttctgctgttctttttaaagttaactctaaattacttgcttgaactatttatttctgaaaggaatgttgatcaagctgccggtccctgctaaagatcctgagggaagtcagtggggggaggaaagaagagtttattaacc

SEQ ID NO: 3822 - DNA, 423 bp, Bos taurus
  Clone ID: 48-LIB3058-003-Q1-K1-D8
ggaagtcctcccgccacctcgtgcccttcgccagcaagttcgtgcggttcacccacaagtacatcagctgcagccccgcagccgccgtcgccttcctgcagaagcatctgaacgtgctgcatgacctgtcccttgacagcagcgacctggtgatgcttaagtcgctcctggcggggctcagccttcctagcagggacggcggggctgaccgggcactggatgaggagggtgaggatgagagctcggctggctccctgcctctggtcagtgtctgcatcttcactcctctgactgcagccgagatggccccctacatgaagaggctgtcccgcggccagacggttgaggatctgctggaggtcctgagcgacgtggatgagatgtctcggcggagaccggagatcctgggcttcttctcgacca

SEQ ID NO: 3823 - DNA, 361 bp, Bos taurus
  Clone ID: 48-LIB3058-008-Q1-K1-D12
gttcttttaagaattttctttttaactcctggcagagtaaacaggcgtttttaaagctcgccactgtcagagccgagcagagccctgtgctcagggaggggccccaagctccagggttgcagtgaaggacactcctggcccctcagcagcccaattttctgcagcaggaaacacgcttggaaggacatgccatgggccactcagtctggccgggggcagcgcagtcctgcgagagctgccctccgcccaaacagagggggcacaccgccctcgggccctttgctcgggaaccccccagacaggggtcttggtcctcatgcagccaaggatacagagctgggtcagcgggttcgggaccact

SEQ ID NO: 3824 - DNA, 201 bp, Bos taurus
  Clone ID: 48-LIB3058-009-Q1-K1-D8
gccagggtatgtgcgctgactgaactctaaatgtatcagctgatcagagtagcgggggactctatacttcaaacggctacatatatgaagcgcacatatctgctgattctatataatatacaggcatactagatttatagaacagggagtctacgtattgctctcaaacaatatttagaacagctttacacatcatatcat

SEQ ID NO: 3825 - DNA, 395 bp, Bos taurus
  Clone ID: 48-LIB3058-011-Q1-K1-D12
gccgttttgtatcgctttaacgttagactaattgagcagtggtatatggggacctggccaaaacttggaccactgcttactaggtgactgtctgcgatgtgcaaaaccaagcttcagattccttcaccgtgtccaggtgcgcatgtgcaccatggcgtagggatgtccgctgactaatacaggtgacttcggccctcacagatgtgctggagccggtctggtcagtcagggaacccatagcctgcttgagatctgggtacagctaggatccagccccggcagggacccccgatttgtgctggcaccggcgtctgctcacgtactggaggacctcgtgggcccctgtgtcccacagccagcctttgctgaggtacctctgaagcctgtgctgtgag

SEQ ID NO: 3826 - DNA, 345 bp, Bos taurus
  Clone ID: 48-LIB3058-013-Q1-K1-D8
gacaggaccgctaactcgtcgttgtgccaggggcctggttcactttgggtcaccccacacctctgtgcccaggttctgaaacagctgatgtaaagcatgggcgggggggtgcggtgcttttagttcactatttaccatagccctgagccggtctgcaagtgggatggctggagactggaaaggcactggcgcctcctgcgggacctgcctcccccacagaatgggcacagagcctcgcttctgggttatctcgggaagttaaatgcaaaataaagatgtttaaaccaaatacatgagggctgagttgcacgtgccatgcgcggaaccagctgtctgacatataaa

SEQ ID NO: 3827 - DNA, 407 bp, Bos taurus
  Clone ID: 48-LIB3058-016-Q1-K1-D12
cggacgcgtggggttctagatcgcgagcggccgccctttttttttttttttttttttggaataaataaaacttttattcaaacaactgcagtacagggcacaattcagatttaaaaaaaaaaaagggaaaggaaacaggaaaaatattttcagcactttacatcttcatacaagttttgcggttttgtgtctacattcatccattgagcatggaatcccctggatttgagatcttttagcaaaattagaacaccaacatagaaggttctttttttttttttttcccacaaaggtccgtgttctggctttgttttctccttaaattataaaacagggtctgtctgcgtcttgagctgcttctctcacacacactaccaggcatgtcctagcccacgggagggggcaag

SEQ ID NO: 3828 - DNA, 284 bp, Bos taurus
  Clone ID: 48-LIB3058-017-Q1-K1-D8
tcagaagattgaccggatcttattcgactctgtgacccgagggaaaaagcgtcagatggagagatagatcagctactcaaagctttgtatggcatctgatgtccaaagcggacctgtagaccgttatgaacttggaattctggttcctgtgaatggacttcgacaggtactagacgctgtgcctggcacagctgaaatacttatacgaggagctgtgctgaagatcttacataatgaccttgaagatcatggcatatatggactcgatgttgcgaacgctagac

SEQ ID NO: 3829 - DNA, 324 bp, Bos taurus
  Clone ID: 48-LIB3058-020-Q1-K1-D8
ccaaggccagcagccgcaggagcagcttcagcatggaggagggcgacgtgctgtgacctgggcgacaggggcgggcctgggggctgggagggccagggcaaccgccccccacccttcaggctgcacttgtgtgtgaagtagcccctgcccggcctcactcctcctgtcggcccccgcaccctgtgtggacttagtgcccgcttggcagcccgtgggttggaagccccccacccaggggcagccctcttcatggggctgggcaggaagaggccttcagcccggctcctcccagaggtgaaatcgtgagggcaaggcgagggggcg

SEQ ID NO: 3830 - DNA, 433 bp, Bos taurus
  Clone ID: 48-LIB3058-022-Q1-K1-D12
ataaagcaccacagtaatttggatcaagattgaaaagctttatgttcagcatcctttatcctctgagtcactcaaaggggcttgctcaggaagtggcatcttctctgcatgtcctttccccgcttcctccccgacctgggcctccctgtctggggatcaggctccctccctttcccagggctcagcctgaagcagctaccctcgcaccccatgcctagactccctgtgagaggaggatttctgagcccctcgaggtcgcctggatggagggagggtgaagacatacagttgtgagtgaggtgtgggcggtgccgttggccctgaggactgtccccagtgtgggctggggaacccctggcctggtgaggaccgtaggcagatcttgcgggcatcggaccagacggagcctgagggcccagcccatgtgctcact

SEQ ID NO: 3831 - DNA, 283 bp, Bos taurus
  Clone ID: 48-LIB3058-024-Q1-K1-D12
gcacaccagccaccacagggtccctgggcccgaatggggagccgctccctttgatttcaggtcccagcgacccctcacccacccgccacacccgccgtcccggacaaagctgacttccacttagccgctcccaggctgccgcacccctgctccctgtgtggtgggggccttgctggctgggctctcggattggggatcccctctgtctctcccctctggctctccgttaaggggcctgtgatggctcccttggccttattaggctcccaagctgcatctcatg

SEQ ID NO: 3832 - DNA, 379 bp, Bos taurus
  unsure (309),(316): unsure at all n locations; Clone ID: 48-LIB3058-025-Q1-K1-D8
ggcgggacgcgttgcggattcccgacggctgctcctgcggtggggaagcccgcagccctgcctgggctcggatagcctggagcgcgggcggtggcggcggcagggggccttggacgggtcaggagcttgcaaagctgctccgagtggggacgtggaaccactggatggaaagtcgagaaatactttttaaagcattttgccctttgcaaaaagagttgagcgctcttcctcaaacgtgctgtgcttttttgcgccccctccctcaaatcgttggtttctctcccactatcctctgcggacagagcttangcacgtntgtttgttacctttggagagcaagtagataaggcctacctagcggaacacccgctttcagctc

SEQ ID NO: 3833 - DNA, 158 bp, Bos taurus
  Clone ID: 48-LIB3058-028-Q1-K1-D12
gtttaaacatctatcaccactctcatttctctactatataactcctttatggccctgattaacttctaggatgggtagtcctataaatattgatacaagcacattcttaacaaatcataacttaataaacttatatacactgaactctatcatttttt

SEQ ID NO: 3834 - DNA, 410 bp, Bos taurus
  Clone ID: 48-LIB3058-030-Q1-K1-D12
cggacgcgtgggcgcgagcgccgccctttttttttttttttttcttgtgcttcgcggggggcctgccctccttatcttgctcactgctgtcctcgtggcccggctcttccagccccagcccgaagagatcagagtcgtccttcagtctgaaggagggggccaggggtttggggggtgcagggggctgcacggggccagcgtcctcatcggtcaggtcggagaggtcctctcgcacagggaactcgcccgctctccgctgagcatctgagtcgctctcaaagtccgggtcgtccatgacaaaggacagcatctgggcggctatgggcccctcggcatcgctctctgacgacactggcttgtccgtgccctcctccagcttgccagaggggcccttggggcggggcttttcc

SEQ ID NO: 3835 - DNA, 52 bp, Bos taurus
  Clone ID: 48-LIB3058-031-Q1-K1-D8
cggacgcgtggaggatgcttatttaattacatactcagcatatataatttaa

SEQ ID NO: 3836 - DNA, 388 bp, Bos taurus
  unsure (230),(375)...(376): unsure at all n locations; Clone ID: 48-LIB3058-036-Q1-K1-D8
caggagggtcagggactttattttatgttaaggcttcagaagatccagcttcagctaagagaggcccagatccccagcttgcccttcagggctccccattctttctaccgcccatcctgagaccctagggattggaggagggaagtcagtggccctggcctctgtgctgggagcccagtggggaaccttcatgccttatctgtttctaaggggttttcttaacaagcctnccagcctccctggaggcaccaccctgctctccgggcggcactgtgatgagacctgtcagctggtccttccgttcacatatcttggaagctttcgttctttggagccagacagttcccagcccctccatgtgtctctgtcatctannggtgggaggggt

SEQ ID NO: 3837 - DNA, 418 bp, Bos taurus
  Clone ID: 48-LIB3058-038-Q1-K1-D12
atctgggagtaatatataccagaatatattgaatggtacactgactgctgtggaaggtggcctgaccatatcttcaggacctgaggggttgtgtgttcatgatggtacctggaagtcagcagtttatggttttggagataagagtaatttgaaaaagctacgaaatgagtcagatatgaagcctgtcccaattgttggaccaaaattgaaaagaaggtggccaatttcttactgcagagaactcaacagttattccattcctttcttgggagcagatgtgtctgttgtgaagcggactcagcgttacttgcatgaaaatttagagcagtcacctgttcagtatgctgcttatataaatgtgggaggcatcacttctgttattaagctgatgtttgctggactcttctttttattcttt

SEQ ID NO: 3838 - DNA, 409 bp, Bos taurus
  Clone ID: 48-LIB3058-039-Q1-K1-D12
gggacccaaactcccggaagtaaacaagtttctgaacagactacgtgctcagcttagaaagaaaaaagaatctctagctgaccagtttgacttcaagatgtatattgcctttgtattcaaggagaagaagaaaaaatcagcactttttgaagtgtctgaggttataccagttatgacaaataattatgaagaaaatatcctgaaaggggtgcgagattccagttattctttggaaagttccatagagcttttacagaaagatgtggtgcagctccatgctcctcgataccagtctatgagaagggatgtaattggctgtactcaggagatggatttcattctttggcctcggaatgatattgaaaaaattgtctgtctcctgttctttaggtggaaagaatctgatgag

SEQ ID NO: 3839 - DNA, 432 bp, Bos taurus
  unsure (397): Clone ID: 48-LIB3058-039-Q1-K1-D8
cggacgcgtgggtgctttttggactgtttctcagaaaatatgggaagatggctctaatgatcactctacatatattgtgcaaacactggattttcatctgggccacaataccatggttaccaaaccgtgtggtgctttggaaagtcctatggcaacaataaccaagataaccaggcgtcgccatgaaaatccaccccatggagtagcaagtgtgaaagaatggttcaattatgttacggccacaaggaatgaagagctaaacctgcttcgtaatgttgatgctaataacactgagaatagcacaacagtgaagaattctagtttgctcagcggatttagaggaagttccagctacaatcatgaaacaaagacaatctttgcactaccaagaatgcancttgactttaaatccattcatgttcaagaaccaca

SEQ ID NO: 3840 - DNA, 433 bp, Bos taurus
  Clone ID: 48-LIB3058-040-Q1-K1-D8
gcgcggacgcgtgggccagtgtggatgagtaaccaggaatggatttgtctgataaagtggatgtggcttaagtttggatctcttgtaagactagaatcttgaaagtgaatatagagacaataatgcacgtatttcagatgttgcaggattttcaggtaactgggcagctctttggatggtactgctattaaccagccgaaagagttccttccagcaaaggagccctttacattttatggaaatagtccttaaaatacacacacatctatggtttggtttctctgttgttcgtgtattcaaattttcaaagaaaagttttatagccagagttttatccttaatgttttggttagacttcataatttgttgcttaaagttttttatgacaggtaaaaagagcagcttttcccattttgaagaataaccttggcat

SEQ ID NO: 3841 - DNA, 117 bp, Bos taurus
  unsure (45): Clone ID: 48-LIB3058-041-Q1-K1-D12
gacccactcgtccgtcgagatcgcgagcgtgccgcccttttctcnttattcctttttttttttttttttggttgtttttttttaaattttttttttcctccccatcagggggcacct

SEQ ID NO: 3842 - DNA, 339 bp, Bos taurus
  Clone ID: 48-LIB3058-042-Q1-K1-D12
cgcgtccggtgacatctttgtactcttccagaccatacattgaaatggactcattcatataaaatggtataaatcctgtaagtgaaaagatagacaattgtcagcagttgcttttaaaaaggtcactataataagtactatagagtacagtattaatttatagcaggaaatcatatcttgtaaactgtatataaaacactgtttaatggtgcaatcatttgtcaaacttttgtctgttacattgtttttagagtgtgtgcattcttctcatacctaagaacatcactgtaaaatctgctgaaaaatatttataggttttatttgcacaagactaaatta

SEQ ID NO: 3843 - DNA, 380 bp, Bos taurus
  Clone ID: 48-LIB3058-043-Q1-K1-D8
ctcagcagtggccgccccggggggcttacccggcaaggggcttgtccgaaaaagactcctcggaaaacactgtgtccctggagcgtgaagcccttgtttccaccctgagatgagcccgcgtgttaggcgcgtccgcacagcaggtcgacccttctcacgacccgggtcggggtgtgcggccacctggtttcaggggctgttctgtaacgtgagattgcagggtgagcacctcagaggatcccgtctgggctgggccaggctgggcaaagcagacaacatggttgccgcagaaataaagcttgggtccgggcagggtgggccctggccccacagtctgttcaaaaaaaaaaaagagaaatcccaaagcctataccaatccg

SEQ ID NO: 3844 - DNA, 431 bp, Bos taurus
  Clone ID: 48-LIB3058-044-Q1-K1-D12
atcgcgagcggccgccctttttttttttttttggttctaatcacttagtcacttgttctttcttcagttgttctcttgggttaagctttttaaaaaattgagaaatatcatatagcttatagttattattgaatacttaaaattggctagattttgacctaaatgctgtgtatcagtctctctttgatcctcttaataaccttgtgatgtgggtgtttttcttattttaacaagtaggaaactgtgcttggagagttttgattcatctagtaattttactagtaaatggtagagctcaaatttaatcaagtctgtctaattccagagcctgtggtctggctcttcatctagaatgtgtataaagctggcatctggccttcttgtgggtccatgtggtgtctgccattttatcttgtccagaataggtgttc

SEQ ID NO: 3845 - DNA, 225 bp, Bos taurus
  Clone ID: 48-LIB3058-044-Q1-K1-D8
ctgaggccagcatgaccaatgcatggttttaggagaccgtgagtacgggccctatacgtgatctcattgagtacaaagttgtaaaatagatgacttaacttgggatttgtgtttgtgattcatgcgtacataataccagattcaccatttagagatgcaaaataaaaaaaagtaaaaaataaaaaaaaaagtaaggaatgaaaaaaaaaaaaaaagggcggccgt

SEQ ID NO: 3846 - DNA, 413 bp, Bos taurus
  Clone ID: 48-LIB3058-047-Q1-K1-D12
cggacgcgtgggattgtttgccttaggatatgatgaattacattttttgttccttcttaccataaacatctgcattcctcagctcagccttccttgtatgttgtttctttataaatggttgagctgctgatgcaggttttgccaagctaacagtacaaatcattttaaagaggaagctggcgcgtatggcagccgaggagcacactctgcaggacactggacaagacagtaaatattcaacttttaatgctgattaaaggagtataggtaaagaatacgtaggtatacataattggtgagacaaatattcactttatttatcttttatatattattttttaatttggtaaatactatccagttttgtagttgtccttgttgatttgtgtgatgttaaagtattagtagtaact

SEQ ID NO: 3847 - DNA, 431 bp, Bos taurus
  Clone ID: 48-LIB3058-048-Q1-K1-D8
agtgcatgcagggcagcatgcgggacctgccagccagagagccatgtctggggctcaagctccagatggcactccacgggcagcaggcccaccagtagccagaacttgatttttgcctcccaccagcaacccccacgcaactcctggcccaggcacgcagcacatgtctcagggcaccattcctatgttctgggaatcctgatgaagccgctgctgcagcctcttccacgggccagggtcaccgatgctccctgggcattagccccagagaggcacgtggttttgccttcatctcttttgaaactgtggctgcgtgagccgtttgcactcaacattgcatgctgtgaaattcctaaccgtgtaaaacttagtttggattccaaaacacgcagcatgtgcaaagggacaggcccaggccaccacgggtcgtc

SEQ ID NO: 3848 - DNA, 170 bp, Bos taurus
  Clone ID: 48-LIB3058-049-Q1-K1-D12
gtgggataggggccagggttcccatgatgcagggattcagacctctgcccttggctggaggaagcctgtgggtaccgaggctgggcgagaaggggctgtcaagatccccattgcaatctcctctgtcctggctctgaaggccttgataataaaggaggggatgtcactgt

SEQ ID NO: 3849 - DNA, 316 bp, Bos taurus
  Clone ID: 48-LIB3058-049-Q1-K1-D8
gggaatctttagaaaccctcctttaatttaaccatgcacatatttttaaaaattttttataatatcatgtaagttaagaattcatgtctctctatgtgtatattatcccttcatcttggatgtgaattaactaaaattcacatcctgatggctcatattcttgaaagagaataatgctaaccaatcagatcacagtttctctccccatgaaggttttgcttattgtgaaggatatctgaggcagtagtctttgttgttgtttttaatttgggagagtcaactggtgctttgatttgaataaaaatcagctttgatg

SEQ ID NO: 3850 - DNA, 387 bp, Bos taurus
  Clone ID: 48-LIB3058-054-Q1-K1-D12
gaaacacatttatctaggtgattagtattctttctgtctgccagatttaaggattgtttggaaatattgttagaatggaaatcaacatttgttgctacacagggtcgggcattccatgcatactccgttcgtttttaacggtgtagctatcatgtacactttcgtcacatctgccgtgactgctactggtctcagtttcacagctgccattagagtgattagcttgtgtgcgtatccttagtgtaagtttatagtcatttgtggtcccatcttataggacattattgataatgtctttaaaagtgatcaagataacacccatgaggctgtgcaacgcatggctgagtaaagctacttacattctgctgacgagtccattagtagctg

SEQ ID NO: 3851 - DNA, 425 bp, Bos taurus
  Clone ID: 48-LIB3058-054-Q1-K1-D8
gggagagcgtagtcacgaaggttcagtttacctcatgcccggctcctccggggccagggtcacggtgaagctcagaagggtgcagagctgggcaggaggcacgggcccagcctcccagggacaggaggatggacaggcgcctcccagcagaacttcagggaccacgccccccgcagggaggtcacaggctgctggaagagccatggcccggcagcttggcaccctcaggggcccccagggctctgagccatctctgaacaaggcaggtctttttggtgctttcagccactttctttcctgcccgacgtggactcaacagtgaaaactggctgggggtgggcagagttgaggggcagggccaggacaggtgtaaccggaccctgtgccactccatgtggaaagaggtgtgtgcaggggtggtgagt

SEQ ID NO: 3852 - DNA, 449 bp, Bos taurus
  Clone ID: 48-LIB3058-058-Q1-K1-D8
gcggcccacgggcctggagaggccttcgccatgcagagcctcatcaagtacagcggcagcttggcccgcgaggccgtgaccgtgcgcccaggcggctgtggcaagaagagccccttcggaggcctgggcaccatgaaacccgagccggcgcccacagctgccccgcgcgcccagacgcgcctcccgcacccggggggccctgcagcatccagcggccgacagctgaagcgtgacccggagaggcccgagagcgccaaggccttcggccgcgagggctccggggcccagggtgaggcggaagtgcgacacccgcctgtgggcattgctgtggccgtggcccggcagaaggacagtggcggcagtggccggctggcacctgggctggcggaccaggagcggtccctgtcgctgagcaacgtcaaaggcgaggccttcttgggcagctttgt

SEQ ID NO: 3853 - DNA, 276 bp, Bos taurus
  Clone ID: 49-LIB3058-002-Q1-K1-E10
cggacacgtaggcgctcttactggaagaccaaggacactacatcaactcttcgccaaccgggctgatctgcgtgctgtagaaccgcatttgacaacatagcctatacagacacgtaactgattaagtatagactcataagtctatgacatgcaggaaaccaagctctccacatcatgatgaaatgaaagtatcgattatagggccacacgattataagatgcaggctgacgtacgcatgcgtacaacgatttatcacaagtatagtgacacactat

SEQ ID NO: 3854 - DNA, 449 bp, Bos taurus
  Clone ID: 49-LIB3058-004-Q1-K1-E2
ggcaattctgagctcagagaagggggttccacttagatttgtgtccaataagtatcatatctgaatcttaagttggacttgggagagagagatagagactgaactgaagacagactgtaaatgggaaaactaaaagagatgctaacctgaagactttgcacagctctgtccccagtcacagcccagctgctggtcttttattggtatctcgccacgtggcaacgtctggaggaagagagcattgcccagtgatgtaggtgaccccactggagggtggctggaaccaaagaatacatctgcagatgtctcagggtaactgtccggacttgtgaacatatgtgagacacccctgggcccctgaatgatctggtctgagattgttgcctggaagtggaggttttgtgtttgaagctaggaggaagagccatccaaatacaggttactggttg

SEQ ID NO: 3855 - DNA, 378 bp, Bos taurus
  Clone ID: 49-LIB3058-006-Q1-K1-E10
gtgcctatcacatagagatagctcctttgctaagccacatatcataataggaagaaatgccactaacttctaaagaagtttaaaccctatatcagattttaattataaaatagccaacaggtgtttcaatgatagaaattagccacatgtacactacattgtttttctaataaagcaatttcttatgtgactcctgatttgtaattagactggaaagcttcagccaccttaattatggtggccagctgctttctagtgacctcagagcgcatactttgcatctcgatcttaacttatccttgattctgtgaaatacagattcatctactatgctcttaaacgtttatattgaaggtgactaaatgtttaatatagttg

SEQ ID NO: 3856 - DNA, 368 bp, Bos taurus
  Clone ID: 49-LIB3058-007-Q1-K1-E10
cactcatcgaccatccgctggttcgtggactcgcattcaccagcctgaaggttggcgtgggacaccggctggattcccaggcgtctggggtgcttgtgctcggcgtgggacatggacgcaggctcctcactgacatgtacaacgctcacctcaccaaggactacaccgtgcgtggcctcctgggcaaagccacagatgacttctgtgaggacgggcggctggtggagaagacgacgtacgaccacgtgaccagagagaagttggaccgtatcctggctgtgatccaaggttcccatcagaaggctctggtgacgtactccaaccttgacctacagacccaggaggcctatgagatggccgttagcggc

SEQ ID NO: 3857 - DNA, 334 bp, Bos taurus
  Clone ID: 49-LIB3058-010-Q1-K1-E2
acgcatcacttgggtaggattctggccaagaatgcataattcatctaattctgaggaaatgccaagcaaattaaaaatgggacattttatgttaaatgagttggaggaacctatattcaccaaaaatatcaatgacataaaaaaaaaaaggtgagtcatgacagaaacttaccatgtctgatctacgctggaagcttcactggacgctgtgagggacgttactggacagacgctgggttaaagtgtcaacctgaatttgagcctgtcccctggtgatgacgatacccttatttgtaggaaatcctcaataacatacttaagggtgaaagacttt

SEQ ID NO: 3858 - DNA, 320 bp, Bos taurus
  Clone ID: 49-LIB3058-013-Q1-K1-E10
tcgaaccaagccttccggttaactcttaaaaaatcaattgtctttgctatttaaaagagcaagaaaatcaataaagggatgacatttatattatctatatttactagcgatgtctattccaaatgaagccttggctcatatgaataaaaagaaaatcatttcggcataatggacctttcttctaaagtaagagagtggaaggagcagggatagaaggaaggtgccaatgttgcatggaacagcataacttttaaaagatggttgcttctaaacattgtgaattactaaaaacttttcattaagaagttacttcctttttt

SEQ ID NO: 3859 - DNA, 346 bp, Bos taurus
  Clone ID: 49-LIB3058-015-Q1-K1-E10
gcgagcggccgccctttttttttttaatcatggattgctttgtgttttttaatggtaaacccatttatttgtcaaaacttagtttgccgattgatattcccgtaaagatgggaacaccacaccacgtccttgaggcccaaccgtatacctggccaagcactgtccacaggcagcttagtccatcagaggttcgtcagaggtccaagagaaaccttctaacctgggccaggtattttggcttcaaatagtcacccagttcctccttgctggcccacacgtgacggcccttctccacggccggggaaaagtctccggttagcagcagggctttgaagaaaaagatctt

SEQ ID NO: 3860 - DNA, 389 bp, Bos taurus
  unsure (238): Clone ID: 49-LIB3058-015-Q1-K1-E2
cggacgcgtgggaattaacatcctccagtgtcatctgacgtttgatattgaaagggaaacacatcagagcctcatggaatggaaagctgaaacgtcagttcgtgttcctcaatcaatatcaaacgtcagatgacactggaaggtgttaattatgacccataagcagacacaatcctgtaacagattccactgaagaaaagggtaggctctcttcatacaggaggtaaaaaattgattnttggtttctcctcccagcactgtcagaagtaaacacagttgcaaagttctcaacaaatatttaagaagctctgtggacagtctgaagcacggatttgagtcaatatatagaagtaaccacttgtttacaggggaataactttctttaaaaa

SEQ ID NO: 3861 - DNA, 327 bp, Bos taurus
  Clone ID: 49-LIB3058-018-Q1-K1-E10
agacgcgtgggtgcagatgcgacctcttttaactcgactaccgacaacacgtggaagtgttccaagctgctatgtatggatttaaatcgtaatcatatttgtatttcctgtatgagtcactggtgaatatacaaagatctgaaaaagctttatattacacctttgtttcaagtagtcttgctgtattttgggaaatgcaaagaaagtggatcttacagaaataacccttttcacagtttgtgcactgggtacggtcagagtaggtcgatgcatattttctgaaatgaaatgtttatacgtgatctttcccttattgtatgaattgaa

SEQ ID NO: 3862 - DNA, 441 bp, Bos taurus
  Clone ID: 49-LIB3058-018-Q1-K1-E2
gttctagatcgcgagcggccgcccttttttttttttatttttttttttttttttgctgtgttagaaatatattatgtacatccaaaacaggacattaaaatattactccgtgttacagaaaagatattaaggctttctattatttacattaaacaagcaagcaccgttaaaaaaaataataaccgaaacaaaaaagccccacccttccttctctgacataccctcaagtcagaggggacaccatgtccctttccaatgaccaagaccctttgcaggggctgtgcccttcgaagacatccttcgattagaaacgtcagctctggctggaatcacacaggcggttgggggaagggtcagggaaaacagagtccagactcgatcaggaaattccggctttgtctggccggctgcccccagacccttgctgcactttgtcgccct

SEQ ID NO: 3863 - DNA, 164 bp, Bos taurus
  Clone ID: 49-LIB3058-021-Q1-K1-E2
tggacgactaggcatatagtaggactccctgtctgtgtactctatggaagttgactattagctggtaaatgttgtcgttttctattaatgagtctgaaggcaggatggtcacagttatccgagctacaggggcgacttcttggggtatacaacttggataaact

SEQ ID NO: 3864 - DNA, 369 bp, Bos taurus
  Clone ID: 49-LIB3058-023-Q1-K1-E2
aagccggtagggttcaggacattcagacttggagatatcttacaatcctgagactcagaaccattcagctgtagaaaaaacacttttgtgtaaaccccattggtgaataacaccaagctgaaacatttcacagctttctactctgggaaataatggggaaaacttaaaaatgtaaaatttacttcagttagtttggggctgaacttgcttacttgaaaaatctggtgctatgcacatgtatctgcttctcctttgtaaatatcactcttgtcttatccttctttactatttaggtccacactcacaatctaattcagtcttacggtctcagaatcataatcatttgaaaattattcaatgagagaaaca

SEQ ID NO: 3865 - DNA, 277 bp, Bos taurus
  Clone ID: 49-LIB3058-030-Q1-K1-E2
cggacgcgtggctttgaagatgcctttggcagaatatctttcatctctaatttccatgaatgattgctttagtataggtgcacgtggctgtcgcggtgtaaatacgtacagttagaactgtctcatttcactatgagatctcttttgagtggctaacagatcaactagtctttgttggtcatggacttttctgtggtgttgtgaatatgcaaaagctttattattttcttgttataggatggatattacattcgtgtcatgtgtggtatgggacctg

SEQ ID NO: 3866 - DNA, 382 bp, Bos taurus
  Clone ID: 49-LIB3058-031-Q1-K1-E10
cttgtagcgagttattaatcataggaagatttttttctcttcgtttgctttctgtttcatattaacaaatttgttttttacacggacacaaccctactgacagtcttcccaaatattaaaatcatttgaatatgtatgctgtgatctcaacactgcccaaaccatcaagcagtcttcatatagtttgcattataaaatctcattaaattctccaagaaaaactaaattacagaattttatttcctgaccatgcaccccctggattcctgattttcagttcagattgtagatgactagataagctgcctttataaattgtcaacaattctgaaatgtaagtccatttttcccatggaagaatcccttattttcatgaattatg

SEQ ID NO: 3867 - DNA, 307 bp, Bos taurus
  unsure (45)...(46),(66),(74),(77),(88),(90),(99),(101),(113),(115)...(116),(122),(129)...(130),(142),(144),(146)...(147),(153)...(154),(158),(160)...(161),(167)...(168),(170),(174),(201),(210),(219),(234),(236)...(237),(241),(246),(248),(251),(264)...(265),(267),(273),(275)...(277),(280),(300): unsure at all n locations; Clone ID: 49-LIB3058-035-Q1-K1-E10
accggcccgacccactcgtccggcggcgctgacggcggagaactnngcatctctttagagcccgcngaaggccnccncgagggagggngncagacagcngngccaagagagcncnnccaggncagcccnnggctccaagaancncnnggaagnnacgngnnccagcnngnccgngacccaggaggaggcagaacaaccgcnccaagcccngcaccgccncaccaggccggccgngnnccgngaccncnccnccgccgaggcganncnggcacncnnnccngaaaaaaaccaccaaaaccncaaaaac

SEQ ID NO: 3868 - DNA, 110 bp, Bos taurus
  Clone ID: 49-LIB3058-035-Q1-K1-E2
cggacgcgtgggaaaaaaaaaaaaaaatataattataaaaaaaaaaaaaaaaaaaaaaagaaaggaaaaaaaaaaaaaaaatataaaaaaatccaaaaatggcctgccct

SEQ ID NO: 3869 - DNA, 423 bp, Bos taurus
  unsure (60),(67): unsure at all n locations; Clone ID: 49-LIB3058-036-Q1-K1-E10
cgacccacgcgtccgtcgagatcgcgagcgtccgccctaagttaccactttgagcaagangctatangaaggagtatatgagcaaacaaaaacaacacagcccacaaaaggcaaagcatttgcaaggcacagagcaagatcttgtttactgcagaactgcttgaaaaggtgcttatcacaagcttggtatgacgaccactgctgccctgcctgcaactcccaactctgacaggtgctatatcttgactaatggatacaatgtaaagccattcctcttggacaaacactataatcaaaaccacacagaacaatccattgaaagtatctgattcgagtctaatgctatataattaatacataattgtaatccttaaaaataatcacaaataaagctaaaattctactataatcacttaattcttt

SEQ ID NO: 3870 - DNA, 393 bp, Bos taurus
  Clone ID: 49-LIB3058-036-Q1-K1-E2
gggaggctcggagtggggaagcggggattgagttttgacctcagggacaggacaggcctgagctctggaggccagaagggcggaagaaaccgaggcccagcccaggagaccacggaggggcaggtggccaagcagagtcccgcaggccctgaggcccagttggggactgtggtgctggtgacgccaggctggggttgctgggggcaagcggagggtctccatcttggcctgcagcaggtaggggttgggggcagggctacagcctgcactggcctccctgaaaacaccaggcctgccctgcatctgcgtcccaagtgggccctgaccttgtcaccggctctgctctgaaggggatgctcaagacccactgggaagctgggactgggcgaggcg

SEQ ID NO: 3871 - DNA, 183 bp, Bos taurus
  Clone ID: 49-LIB3058-037-Q1-K1-E10
ccacctcactcacctaaaaaaggacgaatacttaaaaaaaaagagagccccattccaagcagtcgctattaaaaagaaccctctaatcaacactacacacaccattcacaatcatatcacaggaaatcatatcttctacacattacataaaacactccttaataatccaatcatttgtcaaac

SEQ ID NO: 3872 - DNA, 358 bp, Bos taurus
  unsure (29): Clone ID: 49-LIB3058-041-Q1-K1-E2
gcaagatggagcagaaaattagcttttcnaaatatacatgtggccataatgctgcggaatgtaataaagcttgaacctctttccctgggctccaaattgttacctggagagcaagagggttatgggaaaacaccatgtcagataataggattagaaagaacaactagattaggtgggacaataaaagcttttcaaccctcttaagagaaatcagtgaagttctgtttatttaaagaaaaaaaattacctactggctttgccttttggttctgaacttgaaatccctaaattgcaatatctaagtaagagttggatatttttaggtcaactgtggcaccagttctcatataatccaact

SEQ ID NO: 3873 - DNA, 415 bp, Bos taurus
  Clone ID: 49-LIB3058-043-Q1-K1-E2
taaagtccttaagctgttaggacgagacatccgttccgggtccccgatggcaagacgctgaagcccagctcccctcccagaaccccgtccccagcttcttaatacaactgcctcgacgctaaccattgtctaaattcccaagtgcagcaggcatccccccaccctgcccacatgcgcgtcctgcaggctcctggccagcggctcaatggagaagacggtgcagctgtcagctcacccttgaagatcagcgaggtccctgagggtccagggtgggcgaccctgcacgcccaccttctgccctgggacggccttggacgcggccctggggaccctgccgtcgggcccccatgcatagtgtggagaccggcctgtggctctgaacctcctatggtttctttcccgtcttatttcacct

SEQ ID NO: 3874 - DNA, 403 bp, Bos taurus
  Clone ID: 49-LIB3058-044-Q1-K1-E2
accgacgcgtccggcgcttaattagttaaaagcaattcctttagccattttccatttactatgtgaatagaagcactggtaaaaatttggagccctgagagacagggcagattattaattcatttatctgtagtaaaactcaatctttcacaaattatatatctaaagaaacacagcgcaacataaatttgcaacagataattttaaagctccaatttttaggtaattcgaagaaagtcaatctgtctgttaacagttctttgatgccatcaccaaaagtctacacacaaatgctctaaaatcaaacccctgcttttggttttacagacagttattaccattgggtggtgctgcaaggtcaaatttctattaagttcccctatttagaggaaaagtcatcgag

SEQ ID NO: 3875 - DNA, 341 bp, Bos taurus
  Clone ID: 49-LIB3058-048-Q1-K1-E2
tcgcggacgcgtggggcaatttgtagaagatgacatctagtagaatccctgtttttaaagaacctattgatatgttctatgctatgtgaaaggatttagaccacatgtaacagtggttgctatcgggggaggagaaagtgcagaaagtggggaggagaattttaagtttttccctctatgcttctgaagtgtttgaaatgtttaccagtgtttctccaacaaaccaaatttgaataattgggggtgagcatcttctatatcctggattagagatttattgatgtttaaaactttatgaaatgaatattataatagcattttcctttcatcccaattacacc

SEQ ID NO: 3876 - DNA, 447 bp, Bos taurus
  Clone ID: 49-LIB3058-051-Q1-K1-E2
ctagttctagatcgcgagcggccgccctttttttttttttgtgcttctcgaaggtcttctccctcctgtccttccccccgtccacggcccccttctccttcttcttctccctcatctctttgtccttctgcttctcagcatgggcttgcctgtcggctgagtgtttccggtgccggtcagggggatgcagctcccgcccgtcctctctctcgggggggccgtccccccgcccctcactcgcctccccgattttgaatccgcttgctgtgtagtcgtctttttcatcttcactttcatctgtgaagatatctgcaatataccagcttttctctttgccctttttctcgtcttttttttcggagaagtcctctgagaggactcctgggaaggccttctcccgtttgtctctgccttgatcaagggtcgcccttctgttcttgccttttc

SEQ ID NO: 3877 - DNA, 409 bp, Bos taurus
  unsure (303): Clone ID: 49-LIB3058-053-Q1-K1-E10
gggccgagaggggctgtcccgtcccatccagctgtgagctgtcttcataccaagcaggagacacccagcacctccaccctgggcaggccacactgttcctgggccccggaggtcatacagacagccccagccaccatgactcacttagagacctgggctccggtgccttggtttccccatcatctaatcggggatgtaaacacttcccctgcctacctcatggagctgttttgaggacacagataaaagcactttgtccctcaaaggaagatgactcagaagccaaagctgcctgtgactgangcgcagccctgagtgcacggagggcagtgttggggcagcttgtgaggagtgcatggcccagaccgtgacccccaggacaggagcagcccctgcagagcaggagttc

SEQ ID NO: 3878 - DNA, 404 bp, Bos taurus
  Clone ID: 49-LIB3058-053-Q1-K1-E2
cgcgagcggccgccctttttttttttttttgcaagattatcagttttattttggacaaagtgttgccggaattaggcgaaaattggtagtaggtaccctgactatatagcacagaatttaagattagagcccaacagaaatataggatttaacccaagaggatacttcaagtcatgacagaagacaagatgccccaaaaataaaagaaaggagagtagtacacctttatggttaagacgaggaaccacgaggggtgcggacaaatttgaatttatttcagtgtcttaccatcactcactgcttaacccttttgaatttggcttctgcttgcactacttaaggtacctattactctattagaaatgctgtatgtcaatcctaatattttaattttaatggcattt

SEQ ID NO: 3879 - DNA, 117 bp, Bos taurus
  Clone ID: 49-LIB3058-056-Q1-K1-E2
cggacgcgtgggcggacgcgtgggcgttctcctgctgcagcgtcagcccgtgtccgggttcagtgggtgctgctgccccgatcccgtggcttcagcccgggcgacctttggggcccc

SEQ ID NO: 3880 - DNA, 437 bp, Bos taurus
  Clone ID: 49-LIB3058-057-Q1-K1-E2
cattgtgtctgggatcccctcttaaacattaaattaattaatatatctatttgttaactatactcaaagttgttttttaagacaaattaaaaatctcttcttttttccctaaaatttaaagtcagatattaaataaaatctcagatagatttacttattaaataaaatggcttatggcattttgtgataagggaatgtatcttcactaggagaaaattgtataataattactaataatgtttattaaactcaaatacagcatcttgattctagccttatttcaacattctaagaagcatttatacaataactatattttagaacagaatcagtacgattttagagtaagcaaattgtagtagttcacatttttgtaacatagaactgtgatatttcacatgggtattgtgaaattagtttaaaaagtccttttataa

SEQ ID NO: 3881 - DNA, 426 bp, Bos taurus
  Clone ID: 50-LIB3058-003-Q1-K1-E6
gcagctcctgcctcgacaaagcccgtgccacctgcaagtgcccaccccagccctacccgcaactcccaacccccagccgcgtgggcccccgagctcgcgccgagtccagcccctcctgaggactctgtggtcaggaaacggccgcaggtgggggatgccatccccattcccagctctgtcaccggtgtggcctctggaccgacagctcccaccacaaccccgccggcgcgctggccccctggcaggcgtgggggtccccacggtgaggggagagcacagcagcgggggccctgcctcagcaggaaaaggaggctctgccctggccccgggccagccggggcctcttggctgcttcagctgtagccccattctaggtcctgtgaccccggcctcaactattaaagggccatttcctgtcgggaccgc

SEQ ID NO: 3882 - DNA, 443 bp, Bos taurus
  Clone ID: 50-LIB3058-004-Q1-K1-E6
ctttaacgactggtgtcagcaagtgagcaagctgtccctgctgggaggcgccctgcccatgtttgagctggtggagcagcagccttcccacctggcctgtcccgacgtcctcaacttgtccttagactcttctgacgcggagcgactggaaagattctttgactcagaagacgaagactttgagatcctgtccctctgagagtcctgcaggtggggatggtctcactggccctgcaggggcgctcggccgccgcgtctcgtccacccgctgcccgccgcccagcgccccagcccagacgtctacacgtgacggaagccctgggcacgcgctcccgccgcactgccagccctgcctggcaccccgtgcccttctggcccggctgctcaccttgaaattaaagccctgtctgaagctccatgaaggacatggctgccgctgggcg

SEQ ID NO: 3883 - DNA, 430 bp, Bos taurus
  Clone ID: 50-LIB3058-005-Q1-K1-E10
cttttcagggtttcagaacctggaaattacagtccccattatgtccacaagcattgaggggaagtgcttggaagacaaaggaaacattaaaagaaatgttctttaaaaagacagagacctcctcactccctggcatcgctatttcttctccacgtcttctcttcaacaccctcctaaggaggaaggggcaaagactgtcacataagtagactttccacttgtgaattctcagctgcataaactctgttctttttaacattggcatgttatcctcaaccttttactgctgcacacaaagcacagcacgtgaaatgcatggaatttccgcatgtatatttatagagagctttcatagctgaagaagacaggtgcgacttgcctacagttttttacaacgagttcatatcaaatacaggatcagaatcacttg

SEQ ID NO: 3884 - DNA, 112 bp, Bos taurus
  Clone ID: 50-LIB3058-005-Q1-K1-E6
atatctatcaccatgagccatgcttcttgagcgggcgcacactgaatgacttactggcattgactagacgaggctgaggtacgagtgagcagattggctagatatctgtgat

SEQ ID NO: 3885 - DNA, 434 bp, Bos taurus
  Clone ID: 50-LIB3058-007-Q1-K1-E6
cttcttcataccacagacctttcatttatgaatttcagttattctgtcaggtgaatcatgaaccttgatattagagggaaaaaaaaaaacttaccctgtaaaagtttttacttactcaatatcagtttggatgtttttttctgaattttgttcatgtggaaacttaattccaggacatcttgatttgaatcaggtaaaccaatcaagcaatttaaaaagagataaatggccaagtcagttcctatttaaactgaatgtattaaatgcttaccagtgaaatttctggagattagtagaatatttagtgcaattctaaagcttctgctctcaaattctgtctttggcatgacataatagctgaacattttttcttttaggttgctggttcataatgtagaattaatgtattttaatataagcatgatatttatgat

SEQ ID NO: 3886 - DNA, 381 bp, Bos taurus
  Clone ID: 50-LIB3058-008-Q1-K1-E10
gcagactttattgcttcttaactgactagaaagagccaccagcatcactctgggcctttggactcagtttgtgcgtctgtaggacatgtgtgtgctccattcacactgtatttacaatactgtaatgaatctgaattacacatcctacagtcagtagataatagtgtaaccttcaacatttcagtgctctcatgagtgttctttaagtgctatgtaaatctacccattacttatatggatataacggacttacctgaggaaggagagcacgcatcgcatggggagtggtaaccaaggtgaattttacaaactggtgtgtagtagatttaaatactcaaactaaatttaagtaagaaaagctaataattgtgactttttttt

SEQ ID NO: 3887 - DNA, 395 bp, Bos taurus
  unsure (382): Clone ID: 50-LIB3058-008-Q1-K1-E6
gcggggcattggctccagactcctcgccaagatgggctacgagtttggcaagggtctgggccggcatgcagagggccgggtggagcccgtccatgctgtggtgctgccacgtgggaagtcactggaccagtgtgcagagatcctgcagaagagaacccgggctggtcaggctggtgtcagcaagcccccaaagtgccggagcagagggagtggacctgggggccgcccacctcctcgcagtgtgttcgacttcctgaatgagaagctgaaaggcggggctccgggggccccagaggtgggggcggcgccccctgggaggagcggcaaggaggtataccatgccagcaggagtaccaaacgtgccctgagcctgcggctcctncagaccgaggaga

SEQ ID NO: 3888 - DNA, 108 bp, Bos taurus
  Clone ID: 50-LIB3058-009-Q1-K1-E6
gttctgccatactcatttcaagtattatagacatatgtaatggtgaaaatatatgaactgtggcctttttcattcttgttacttgtgatgcaattaagtgaagataag

SEQ ID NO: 3889 - DNA, 210 bp, Bos taurus
  Clone ID: 50-LIB3058-013-Q1-K1-E6
ctagatcgcgagcggccgccctttttttttttttttttttctttatgtgttaaaataatttaattctccctgtacatttctgtccacatgagccaacataagtcaagaaagcatactttacaatatttacctgttttcggacattcaagtcaatttcagatggcaaaagtagaattcagtcactaatgacatgtttaaaaaatatatatt

SEQ ID NO: 3890 - DNA, 423 bp, Bos taurus
  Clone ID: 50-LIB3058-014-Q1-K1-E10
aatacaaccgcctcgacgctaaccattgtctaaattcccaagtgcagcaggcatccccccaccctgcccacatgcgcgtcctgcaggctcctggccagcggctcaatggagaagacggtgcagctgtcagctcacccttgaagatcagcgaggtccctgagggtccagggtgggcgaccctccacgcccaccttctgccctgggacggccttggacgcggccctggggaccctgccgccgggcccccatgcagagtgtggagaccggcctgtggctctgagcttcctttggtttctttcccgcctcctctcacctcttaaagcacttcctttcctaaccgatcacagtggagcggcttcgcggcgggagctttggtacgtggcaggcggtcggtcagctgggagtgtcccgtgtggtggccgc

SEQ ID NO: 3891 - DNA, 206 bp, Bos taurus
  Clone ID: 50-LIB3058-016-Q1-K1-E6
ggtggaggtgaagattaagcccaccacgctgcaggtcgataacatttccattggtggtgtggatgtcccactggaactgaagtctaaagagcccgatggggacagaatcgtatatacaggaacatatgacacagaaggtgtgggcccaaccaagagtggagaacggcaggccatccagatcaccatgccgttcactggcattggga

SEQ ID NO: 3892 - DNA, 361 bp, Bos taurus
  Clone ID: 50-LIB3058-018-Q1-K1-E6
ctcggacggcgatcggggtgtgctggtcgccgtctcagccgggcgagcccttgccaggccgcacgggcctccggcggcagtccccggggaccggcactgcctgccgcggacggcccccgctatgggacgcgcggcactggagtctgcagcaacagtccgagactgggggacgcgcgctacgcgcggcgtgctgtgtggccagaacccctgaggggcgccgcggaactcgtgacacgggcccgggacccgggggaaacgggacgcgaacggaccggccgctaccagcgtattggagcagtcatagccccggcccttgcggcgtcggcgacccgggtcgggcaggcgctgaactggaaggagc

SEQ ID NO: 3893 - DNA, 331 bp, Bos taurus
  Clone ID: 50-LIB3058-020-Q1-K1-E6
gtggtcttttttccttccccctttcaagcccagcccgtgtgcccgatgtcctttctcaagttgcccacggtatctccacttaacctaagctagtaaccaaaacaatgtcatgtggaccttctttaggaaacagtgtgggagaataggagtctggccctgagataccctggcgatctttgggcatcttgcacatggccacataccacctcgatgttgttctgatgtcatgaggccccacgtagacttctctttggactgccctgtggtcaaagcatccgttcttagcactgcgccctgatggtcgggcaatccacgcagtgcaagaaacccc

SEQ ID NO: 3894 - DNA, 405 bp, Bos taurus
  Clone ID: 50-LIB3058-024-Q1-K1-E6
cccaattaaaaaaaaaaaaaaagtttcagtgtatgaatgtcaaatcgattgttgggtcaaaaatatatttagagactctgaataaaaaatttcaaattgacttcggtgctgttctagaactgtaccctcatataccacagatctgtcaaaactggatcaagcttgtgctctgggcttctagacatgaaacgtcccacagttttcttttctttccttccctataggatatgctttcctttatcaaccataaagggccattcacagaaggcatcttcagaaaatcaggcagtataaaatcatgcatagccctaaagaagaaactaaactgtggagacacagtgaacttgaatgatgtaccaatatttgtgatatcctcagtcttaaaggtaaggaaagtctgagcat

SEQ ID NO: 3895 - DNA, 382 bp, Bos taurus
  unsure (318): Clone ID: 50-LIB3058-025-Q1-K1-E6
cggacgcgtgggtggtgcccgggtgtggacgacgctccagaggggaggtcggatggctgcttctccttttccctttgtagcgtgtgatttgtggcaatgaaatgtgtctcttcatgattctaaccctctgagaaaggtggaaagaaactgaaaggcctctttcctttctatcccagcccccccaccccccgccaagtttgttgggtcctgccgctcaggctgacctggagctgcttcttcacatctccgagcctcagttgttctgtggttaaaatgaagacgatagcgcccaccaaactggggccctgtgcgagtganggaggctgtggcttaagtgcccaccccgggccccgcacaccggtaggcccaggggaatgaatgg

SEQ ID NO: 3896 - DNA, 425 bp, Bos taurus
  Clone ID: 50-LIB3058-029-Q1-K1-E6
atcattttatcgagttcgtgtctgttgtctgcagatgaaagtctcttctcagaaaaagtaaggcttcgcactgccgcatgaggagtgtggccctgttcccagagcccaggccccggacgccacgtctccagcatgcctctcccacctgcggtgcggcggctcctggccgtcatggccgtggtgtcgtcgggctgacgtccactggcacttggttgagtcctgcagtggcagtatgggggcaggactgtcagcccgctttggagatgggggttggagcccaggaggctgagcgcctggcgtctggtgcagagcgggctggcccttgtggctcgctcagcctctcagcaggggtcagggtggacacgcatggaccccggctctggcaagaggcagggggctctcctcacacagtcccgtgacctcag

SEQ ID NO: 3897 - DNA, 350 bp, Bos taurus
  Clone ID: 50-LIB3058-030-Q1-K1-E10
cgaaaaagcattgacagttgaaatgatgtgtcgaaatagtcaggtaaataaattgtacttatgctcgaagatgaggcgcagcactctttatcctgtcatcaatgccctagtgcaacatttgctctttacgaaactgtgaaggttgctcccacatatgtaggaaacttgtaaacactaagctgttttatactcaatgctaatattaactcaagttgtccatccatataagtgtaacactataattcagagcactggatattctatgtcatagtgagcctgcatcatctctcaaggcatgggtaacaacagtctcgtagagtaagctgggcgtctggcaatagcagatgaca

SEQ ID NO: 3898 - DNA, 90 bp, Bos taurus
  Clone ID: 50-LIB3058-030-Q1-K1-E6
caggcgcgtgggcggacgcctgtactgacgcctgggttgaattgcacataggaataggtaagctgtgctatggactgacccttctatacc

SEQ ID NO: 3899 - DNA, 69 bp, Bos taurus
  Clone ID: 50-LIB3058-032-Q1-K1-E6
taaaaaaaaaaaaaattaaaaaaactatttttaaaaaaaaaaatacaaaaaaaaaaaggaggatatatt

SEQ ID NO: 3900 - DNA, 430 bp, Bos taurus
  unsure (399): Clone ID: 50-LIB3058-038-Q1-K1-E10
cggactcgtgggtgagcctgaggttttctataggagtggctctgccagcctcttcagcttgtacccacataaccagcgcccatgaaaacaccccatttgaaaaatggacatgaatccagcataaacaggtaggaattccaggcaaaatgtgtaagtgcttggcgagacaatgcatgcattttgaaaagaaggactatgagaaagaagcttgaaaggcagcaggtatgatgtctgagtgatttggaaagtgattttatcctgtgaaataggtggactgtattaaaggacttacgtaaagggagtgacagagtctggtttatgcgtcaaaataaattgaagaggaggaagcctggaggcaaatgacaggatcagaggttgtcacattaatggaagatgaangtggtcgtggaggtgtagagaaggagatggc

SEQ ID NO: 3901 - DNA, 386 bp, Bos taurus
  Clone ID: 50-LIB3058-040-Q1-K1-E6
gcggtgaccggcccggcccgcccagtccgtgcccgggcccgcggttttctacccgtactggacacccagcgtcgaggtcactgtgaacgcgggccgccccgtgcgcccgccccgccggcaccgcacgccccggcccctgctgcccgtcacgcgctcgtgggttttttaccttcctgaccccacgcgaaggcgcccgggctgggctgggggccgtgcctctccgccctgtgcccccaccgggacccctcttcctcgaggtccgacgcttcgtccctacctgctccccacgggcaccatctctgccattactcccccaccccacccccgacgggccaggccgggccgggtcccccatctgggctctgcgtcccccttctgcccacctc

SEQ ID NO: 3902 - DNA, 238 bp, Bos taurus
  Clone ID: 50-LIB3058-042-Q1-K1-E6
ggaggagggaggtggcggcggcggcgtcggttgcgttgagagccagatcctgaacccggccggggcgagcggagcggggcgcggcggcccggcggcggcggcggcggttggcccggaagaggctgccccggcggccggttttgcaaatcttccggcttccgccccggcggcccgccccggcttgcggaagccccccagccaggggccgggaccgggggctttccggccgggagtggac

SEQ ID NO: 3903 - DNA, 444 bp, Bos taurus
  Clone ID: 50-LIB3058-043-Q1-K1-E6
gtgctagatcgcgagtcttgcaatgtgtattgtacgtacacaggtgctggtcgatgtccagtttctgcttttctttctttctttctttctttttaaaaataattaaaaataattccccccgcagtgaacccaactgactcctccgatgtaattgatcttccagtctggtggaattgggagtcttaacatgtgaaaccaatttagtgtaatgtaattggctttcaaatggtttctctgtgctattttttggaattcattgtgatactagagataccttaagtctttgatccaactgaaagtttgtatttattttctttggaaataatatattgtgtctgtgcagaaaaaaagtagcaaaaaggattgctttactccaagaggaggagagtttatcttattaggattgttacaaacctctaagctgatggttaatataacagactg

SEQ ID NO: 3904 - DNA, 428 bp, Bos taurus
  Clone ID: 50-LIB3058-044-Q1-K1-E10
cagagtttggaggggttcacctttttgtttagtttattgtctgacctcctaaaagtataaacagcccctcatcattttctgatacagggcctgaattgtcacactctgtctttctgtatcttttatcaccatttcctgcttgaaaacgccagttctctggctttattttgtgtgcacctttgcctgatcgatattctcttgatatgtccttcactctcctgttgtttgcaaataatgattccagctgcttcatcctatgctttctagttgaggatgtgttcctgatgtgaggaatccaaggagcagagaatttttgtgacttgcccatggtcagtacatccagttcctcctttagtttagaatccagctctgcagaaagcaatggcaccccattccaatactcttgcctggaaaatcccatggatgga

SEQ ID NO: 3905 - DNA, 203 bp, Bos taurus
  unsure (31),(33)...(34),(37)...(38),(41),(43)...(44),(62),(68): unsure at all n locations; Clone ID: 50-LIB3058-046-Q1-K1-E10
gtgctagatcgcgttttgccgcccttttttngnngcnngcncnngggactaccccacgaacncacatnaattcacagacggacaaagggacagggacagacctgagctcactggggactgccccccaccccaggattcggcagttccaaagaggtgatggtgtccagtgtgtgaaacggggaggcagccaggctggggggggg

SEQ ID NO: 3906 - DNA, 443 bp, Bos taurus
  unsure (24),(39)...(40),(83),(85),(108),(110),(130)...(131),(138)...(140),(169)...(170),(176)...(177),(193),(195)...(196),(214)...(215),(233)...(234),(267)...(268),(289)...(290),(308),(333)...(334),(344)...(345),(383)...(384),(393)...(394),(402)...(403),(415)...(416),(422)...(423): unsure at all n locations; Clone ID: 50-LIB3058-048-Q1-K1-E6
taccggtttcggaattacccgggnctcgacccacgccgnntccgaaaaggttacctcacaggttgataacctgggctttttgntngcggccaagcccgttcattagcngnatcgtcgcgtgttttggatnnccttcgnnnatgtcggctttcttccttttatcattgtnngaagcnnagaattcaaccaagcngnnttggattggttcaacccnnactaatagggaaccgtgnnagctgggtttagaaaccgtcgtgagaacaggtnntagttttaccccttactgatnngatgtgttgttgcccatngggtaatcctgggctcagtacgagnnaggaaccgcnnaggttcagacccatttggtgtatggtgcccttggctgnnaggagccannatggggcnngaagcttacccnnatctgnntgggaaattatgaaactgaa

SEQ ID NO: 3907 - DNA, 224 bp, Bos taurus
  Clone ID: 50-LIB3058-050-Q1-K1-E10
ccgggccgacccacgcgaccgcggacgcatgggtgggtcacccttcccttgtcaggcctaccttctaccatgacgggctggtgcctattgtatgggatcggggctgacccaggagggcgtgaaggggctgctcactgtcgatggccttggtctctatcaccctgtccatgagatggacgccatattatgtatggtctataatatccctactttatagagggacc

SEQ ID NO: 3908 - DNA, 365 bp, Bos taurus
  Clone ID: 50-LIB3058-051-Q1-K1-E6
cggacgcgtgggcggcgccgcgggtggttctgcggcctgcgtgggggttcccgatggctagaatctagaagtagaaatatgagctcacctttggcctcccttggcaagacccggagagtgcctctacagtcggagcctgtgaatcctgggaggcgggggataaaaatctacggaaatgaagatgaggtggacatgctgaatggcgctcatggctcagaagaaaggatctctgtcccttcctgctatggtggcataagtgcccctgtgagtaggcaagtccccgggtacaatgactcggagctggtggccaccctgacacggaaactgcgggatctggaacgtgcagtgaaggcccagactgatga

SEQ ID NO: 3909 - DNA, 439 bp, Bos taurus
  Clone ID: 50-LIB3058-052-Q1-K1-E6
atatccgactgtccaaggtttaggatatcaagtatgaacctcagcttctcgcagatgatgatgcaagactgctacagctggaaacccagggaaatcacaattgctacaactacctatacaggatgaaagctctggatgctatccgtgcctctgagatcccatttcatgctgaaggccgacatccccattccttaatgggcaagaatttccgctcctacctgctagatcttcgaaacactagtactcctttcaagggtgtgcgcaaggcccttattgataccctgctggatggctatgagacagcccgctatgggacaggggtctttggcctgagtgagtacctgcgctatcaggaagccctgagtgagctggccacagtggtcaaagcacgaagtgggagctctcagcgacaacaccagtcagcagccaaagacctaac

SEQ ID NO: 3910 - DNA, 264 bp, Bos taurus
  Clone ID: 50-LIB3058-054-Q1-K1-E6
cggactcgtgggtttgaaaattagaagcttctttctaacatgtattgatatgacttgaattattattttctgaaattaagaactctatataccagtaaataatttcacataatatcatttaaggttttgtttatattattgttgacttatggcttagacttgttttttctttaaaagactgcagtcaatgtgcatgcttttatctttttcacaaaagggtgtgtttggatgaaagtaaaagagataataaaatctttcactgtc

SEQ ID NO: 3911 - DNA, 327 bp, Bos taurus
  Clone ID: 50-LIB3058-056-Q1-K1-E6
cagaagtcaatctcctgaataaattttaagcaacagaaaatgggttatgtggctcagttgccatttggcaactactcttcctttttagactgcagaaaggtactgttgcccttgttgcctctgcaacagcctaaatctgaggaatgcagagaaaaagatgtgtccagaagaagagttcccttcctcttcttgcacttggtcaatcctttttcaagtcaaaagtttttcataatgtcagtgtgcattatatttaaattaaagcatcctcagccttttaacatgttaacaactaatccactttaaccttttgagcccaccacattgcta

SEQ ID NO: 3912 - DNA, 52 bp, Bos taurus
  Clone ID: 50-LIB3058-057-Q1-K1-E6
cagaaatcaagatcctgaaaaaattttatttcacataaaacgtataatgtta

SEQ ID NO: 3913 - DNA, 340 bp, Bos taurus
  Clone ID: 50-LIB3058-058-Q1-K1-E10
ctagatcgcgagcggccgcccttttttttttttttttttttaatcacgttttccttttagagaaggctttttactcaaaagtgtagctttgaaaatctctagcttgttgcgacaaccagagaagccagagcggccttgcctgaacacagcgcggggccctcacgggcgctccgagccagggtggagggcgaacgcaccgcttcacaatcagagccaacgcggaaattcaggggcaggatacgcatgtcctactttgatttcaggatgaaggacaagttcttagcacagtatatcataacactcagttaacaaatctttagaaatcactagatatgtgtgt

SEQ ID NO: 3914 - DNA, 418 bp, Bos taurus
  Clone ID: 51-LIB3058-001-Q1-K1-E4
gtaagcttaactgtggaataaatgctgtatatagagatttagaaaattataaaataatcatacatctattagatttaagaaattgaatgagatcacttaaaaggagaatttagctggcaaagggctcaaccttggactactcaaatatagggagtatttcagaagaaaaagcctgcctaggtaaggaaatgagcaaaaagaaagacaggagagtgttcacaaaagtcatgaaaagaaaaacttagggaacaaaacatagtccattgggctaactactagggggagctagtggtaaagaatcttcctgccaatgcatgagacctaagagacaagggttcagtccctgagtgcagaagatccccttgaaggggaaatagccacccattttattgagttttgcagatactgtattttttaa

SEQ ID NO: 3915 - DNA, 372 bp, Bos taurus
  Clone ID: 51-LIB3058-003-Q1-K1-E4
gtagatcataacgtgccgatgtgagctcttgctgactgtatgacactctccttgcctggagtcggagactaccatgagtaatgtgggaacgggcacaggcacataatgaattatgcacaactctggtgacgtacatggcggcgataatgctggcatccttacctccagatagcagcactcgagatctgatgccaccttgtgacatctcctgattacactaagctttgagacaaagagacgagttgatatacatctacctgaccatatgctacctctcgatagaagagctgatgactgtcagcattcgcacagactcataattaacggacgatacgaccacactggaagtggcctgaggagattacgggatga

SEQ ID NO: 3916 - DNA, 457 bp, Bos taurus
  Clone ID: 51-LIB3058-006-Q1-K1-E12
gcgggattacgtcttctacctggccgtggggaactaccggctcaaggaatatgaaaaggccctgaagtatgtgcgagggctgctgcagacagagccacagaacaaccaggccaaagaactggaacggctcattgacaaggccatgaagaaagatggactagtgggcatggccatcgttggaggcatggccctgggcgtggcgggactggctggactcatcggacttgctgtgtccaagtccaaatcctgaaggagacggcatccctgcgtctgtgcagggacacgtgggagcccatggaggacactggaagagcgccccacccccccggccatccctttcttctcctgcacccatccctgtcctctgtggccgtcaccctctcccctgagacctgtcacctatccccaaatcatgcacttggagatgagtggtaattaaactttacttgggcttggg

SEQ ID NO: 3917 - DNA, 391 bp, Bos taurus
  Clone ID: 51-LIB3058-009-Q1-K1-E12
tttgaatttgtgcctctctgtttcccttgagccaaatccctcacctcatagttccctttggctcctgcagaattctgaggaataccaggtttcccccatccttttccataaaacatatttatgtatccatactaaagagtactttctgaggagtacttcatagtttttttttttaattgccttgtttgccttcagtttccttaattttcatggtttacatggatgtgtgtgtaggggctatatttgtgtatatacacgtgggttggggtttttgcatgtgtgggttccatggacgtatgatccccacaagctgtgggagtgattggccaggccttgtttttttaatgtgtgtttttgtttttttcgaagaagaggatgctatttagaaaag

SEQ ID NO: 3918 - DNA, 211 bp, Bos taurus
  Clone ID: 51-LIB3058-009-Q1-K1-E4
gtcaatatcacgaccagtcttcagagttttatcctcatataaatacactgtatatactaggggtcttcatcacacagccgagttgacataaaagactacatatttatcatacataacaacattataaaattgatatacctatcaaatcagaataaacaagctacattatctacactactataatcaaacacgtcatttattattaatccaa

SEQ ID NO: 3919 - DNA, 364 bp, Bos taurus
  Clone ID: 51-LIB3058-010-Q1-K1-E12
agttgcgcctcgatcaatagtcccaactttatcagccttcagttagctcaagacggtaagtgggtcactcctatgaaaagtcccaaccaggaagtcgtcggcagcctgctcttacccatgcagatgagtccacagtgcgtggcagatgttgaggtggtgtaagacacagtcctgtgtgttagatgagcggaagtaggaggagagcttcagaccgtgtagcacatttccagggactgaatgcctccatgtagctcagaatcccgtcagggccagaatgggtggcagccaacagagtgcaagtgacagaagctcttccaggatgagtggccctgactgtgggcttggacctaagatcgaacaagat

SEQ ID NO: 3920 - DNA, 389 bp, Bos taurus
  Clone ID: 51-LIB3058-010-Q1-K1-E4
cggacgcgtgggcggatgtaggccggtgaaagccaccgctcccattcgacagagacgccggtgcggggcagcgcgtcatccggcgcgggcgtgggatcggccaaggcgtcgaagagatcctcgatcagcgcgttcgcactgagggcttgcgtcagggccgctcgaacccgggtctgcgaccgggtcaccttcggacacagcgtgtccagcagtgcattggacagaccatggatgccaggctccacgcgctggaagggcgtattgtcgccggaagtggcgcacggcgactcggctgacgacgcgttttcgcggtaggcgcacggatggtgcgaccaccattggatctcacggtcatagcccgcgagcaagttgaacccgttgtaggccac

SEQ ID NO: 3921 - DNA, 185 bp, Bos taurus
  Clone ID: 51-LIB3058-011-Q1-K1-E4
tcgacccacgcgtacgcgtcctgttcgcttccactactgccattgacatacacggggaacctagattgtacaggggggggttaataacataggcttatgaaattaaataggcacatcttagagctctgcaatccgaccgtgcgcgtcttacttggagccctatcttgcaagtagtacagacagag

SEQ ID NO: 3922 - DNA, 427 bp, Bos taurus
  unsure (344),(350): unsure at all n locations; Clone ID: 51-LIB3058-013-Q1-K1-E12
gcggacgcgtggggtcagtgtgggccaggaaattggtgtgtcgttcccattttacagatgagaaactgagcttctgagaagttaggcagttgctcaggatgacagtgtccccagcccccaggtgacgtcacagggcagtcccctggccgcctgttgccagaagtgtccccctcccaagggcctggactcttggctctgggggtgggtctggctggcagggaggacagagggtctctggatcttctgccaggctgggtggggtgggcagggtaggagccgtcctggagagaaccctccagaaggcaaggcctggcccaagctgctgggctgagaaggggatcggnggcggngggatgcggcggaagccttcgggacgggtccaggcggtgcccgaccctggggcttctctccaggagatcttcggtcc

SEQ ID NO: 3923 - DNA, 122 bp, Bos taurus
  Clone ID: 51-LIB3058-013-Q1-K1-E4
gttctagatcgcgagcggccgcccttttttttttacttggcccatttagtcctgaacgggtgggcttaactgcgctgacactctcatgcaatctcatgcagcatacgttcataccatgtaag

SEQ ID NO: 3924 - DNA, 174 bp, Bos taurus
  Clone ID: 51-LIB3058-014-Q1-K1-E4
ttgattgaagcccccacgttttcaaacatcttattctctatttctgggcagctctgctaacaggtcagcgctgtcttaggaggcatctgactcaaccttgcaagcatcttgcagtatctgaactattgtcctacatacgagaactttcatgtccctgctagtgatgttctgggt

SEQ ID NO: 3925 - DNA, 264 bp, Bos taurus
  Clone ID: 51-LIB3058-015-Q1-K1-E4
ggatcggcggcgtggccgtggctgtcggcgtgcgtcggttcgtacggcagcccggagcgggattcggtgaaggtcagctatgacgagttctcctgtaggcaggagcgtcgtacggcagcgcggtgcggtccgtctagccgccgacgagcgacatgcgcacggtcggataggtcttgccatgcgcgcggtccggacgctcggctcgttgctgggcatatcggtcgtagtgctgagtccagcgatcgagcactgcaggcgatttac

SEQ ID NO: 3926 - DNA, 437 bp, Bos taurus
  unsure (385),(398): unsure at all n locations; Clone ID: 51-LIB3058-019-Q1-K1-E4
gaaaatgtgaagcacatctcctgctccctgctcatcctgcacgccgaggacgacccggtcgtgcccttccagctcggcagaaagctctacaacatcgccgcaccgtcacgcagcttccgggactttaaggttcagttcatccccttccactcggaccttggctacaggcacaagtacatctacaagagccccgagctcccgcggatcctgagggagttcctggggaagtcggaaccgggacgccagcactgagttgctcgccacccgggagcatgaaggcctctgccctcgtccccctttcctcctgccagcccggccccccggagatgcgcccggagagggaacacagattccaggggaggccctggcagacctgaggcaccgncctgggtggcggngagcagggggtctctgtggaccacgcggaggcggcatgt

SEQ ID NO: 3927 - DNA, 426 bp, Bos taurus
  Clone ID: 51-LIB3058-021-Q1-K1-E12
gccattttagaaattgtacccagtgctccattttggactcttgttgagtttgagggctactccatttcttctaagggattcattaaatgttgcttagctgatcaaacattaataacaccttttaaaaaatattatgggtcttctttcttccctgtgtaaaattcctgtgttaataactattttgacaaaagtaaaagatttctgaaacaatttccaaagcattttattgctggtttttgtcatcttcccactttggggttggggaaaactttgaaggcttgtgtatttttctctttatttggtacagatttctttagttaagattgggtgtggaatccttaacaataagataatgtttcactcaatttttgttgtttagattcttttttattttatatttcctgaatctattcatagttttatttt

SEQ ID NO: 3928 - DNA, 344 bp, Bos taurus
  Clone ID: 51-LIB3058-023-Q1-K1-E4
tcagagaggacctgggtgctcagctcttaacagtgcaatattagaaacccacaatctgccaaagcaacctccactcgccctagccatgggacaggccacccagtgtctgggactgatggctcgatcaggaatcggatcctgtgcttttgccacggtggacgactacctacattagctatgcattttcggagctcacacttgcattgtggcgcatagacgacatggaagtagaccagctctgctgatttgaaacttagatttttaattatgtactggggacaggtttttgtcgctttacattgcttcctagtttacagcatgatgcaaaatgaattttcttaaaa

SEQ ID NO: 3929 - DNA, 428 bp, Bos taurus
  Clone ID: 51-LIB3058-027-Q1-K1-E4
ggagtggagaaggcttcctggggaaagggcattttagctaaggctttggtgtatgaagaagagcttggtaggcaggcagagcaagaggaaaagtcgaagaaggtcagagctgactgatgtttggagaccgtccccttcatctttggagtggggctcagagagcatctttggcatatgggctcagtcgaggccatagtgcaaggtccgggaggcgagagggcccaggaacgaggcattcaggaaagcaggtcatcagggccatgtggggctgaagggtggcaggtgcagcgactccagccttaaaacctttgaaaaccagagactcctatcccaggcttgagcgcctgggtgccttcacacacttcagcacatgagcactgcctgggtactgcatggcctgaaaaacacaggttcaaaggcagacagac

SEQ ID NO: 3930 - DNA, 281 bp, Bos taurus
  Clone ID: 51-LIB3058-028-Q1-K1-E4
cggacgcgtggggccaggcttggtgaatagcagagtcccctctgttgacgggaccagcacagcgctgagctggcgtgtgggggcgcagagagcacctcaggacccaggacgagacaggcaggcagcttctttctcgcgtgtgctcaccatgctggtgcatcagccctcctgaatctgtattctaagtcattttacagttggagtgagcccttgtcatgccgagggttttgtcctgttccgtgacttatctttatcagcagtaaaccttctctacccggaaa

SEQ ID NO: 3931 - DNA, 425 bp, Bos taurus
  Clone ID: 51-LIB3058-029-Q1-K1-E12
aaaaagcaatgacagtaaaatgatgttgaaatagtagctaaaaaattgtcttatgctgaagatgaggtcagccttttatccttcatcaatccctagtcaactttgcttttagaaatgtgaagttgccccacaatgaggaaactgcaaacctaagctttttataccaatgctaatttaaccaagttgtccatcttataatgtaaactataattagagcagggatatttatgtcatatgagctgcatcatccccaaggcagggtaaaacagctctagagtaactgggctctggaatagcaatgacagtcctagtcccttgggaagccgaggatggaagaaagagatgcctccaactggtcataccaagaaggtatacatagtgccccagaccctgccctgccaaaccacatcatcatcagacacaag

SEQ ID NO: 3932 - DNA, 314 bp, Bos taurus
  Clone ID: 51-LIB3058-031-Q1-K1-E4
cggacgcgtgggttggaaagggaaaatggctcaatgaatgttttaagtaatccatgtgccagactgcaatttgaaactgcatgttccccaaagcacacattgagttgaaatgccaagtcttctcttcagataccattgtttctgttcatgtatcataggcaccttctgttcatctgcctacaaaatccagcattttagggttgggcttttggataaataatatagagtgaagaatgagtcaaatatgcatatttgtcactattttcacttgggctcaattcacttgtcattttaagaagtcaagttttttaaaa

SEQ ID NO: 3933 - DNA, 322 bp, Bos taurus
  Clone ID: 51-LIB3058-035-Q1-K1-E4
gcgtccgtagatcgcgagcggctcgccttttttttttttatctttgaagttctacatagaaagcagttaggatttgtatttccagtgcatgagtattttaggacagtgtcagatacacatctttaggaaataaggaaaaattaagtaacagatataattcattggattttcaaaatgaacagaaaacagtccagcctacccattcctggaccagatctggacgacagggaagttcaagtcaaatcagtgtcggcttacttgcccatgactagcctaatgtatgtcatagtacttaacaggagattacccggaaaaagttcac

SEQ ID NO: 3934 - DNA, 434 bp, Bos taurus
  Clone ID: 51-LIB3058-037-Q1-K1-E4
tcgaagtgctgtattacccttgagaatacatggatttaggaagatacgctttgcttcagtgtcaaggttggtgtgggtgaagctgtggcatcaccacaaagctgcatgtcccacaggcctgtgctcatcaaaggttaaatccccgggagagaaagtcctctacacctggttcgtggcagactctgtgggcaggagccacacgccttaagaattcacctctgctgagttaatgttctgtcttgtcttccgtcgtcttgtgtttcacctgtgtgaaaaagctttgtactgcctctcctcttgaaactgataaaaacctataagcctcagtgaatgagcttgcaccatcttgtatatgtacaggaaacccatcctgtctcctaatgtgattactcatgtacaatatcattgtgtaaaattggattaaaaagggagag

SEQ ID NO: 3935 - DNA, 406 bp, Bos taurus
  Clone ID: 51-LIB3058-040-Q1-K1-E4
gttcgaagcctgtcagtgtgaaaccaactcagtacttaaacaggtttctctgaccccaagtcgctcgttctgctgcaatgatgtcgtgtgcctgcaaggctccctgtcctccaggccactggccaccagctctgcttcgcaagagtttccttcaaaagtcaaaatacattttcatttgtgagcgattaatctctctcctttccaatctcatatggcctgttctcaatgcattaagaaatgacccatggactcttcttaaagctaacagaactagcagttagaaaagctcgaaaatgatttaacaatgaagctggcactacagtcagctatttgaacttctaagttcatagcctcaggcactcgtactctgcagccagacaattttgtccaacgtctacataaatgt

SEQ ID NO: 3936 - DNA, 426 bp, Bos taurus
  Clone ID: 51-LIB3058-042-Q1-K1-E4
atattactaggcagcttctgtatacattgtcaaataagcacattgttcattatttaaatgcaaatgaatctttcaattattattgcccatgtaatttttagagaatgatcattgccttgtccctttccccacttcactactctaagataagtggatgtgcttaattctttttctgttttgtcttttattattaaaggaaccttacagaaaataaaacatttgttttcaactaaaaaatagcaactaccctggtatttatattcagttttatttctgcaaaatagccacatttttacataatccaaacaaattgtcttttgtaactgtaggctaaatatggtaaaatgtggcttaaaataatctccctattgtgttacaatatatgaataattataagtgtaaacacttgatatcacccgttactat

SEQ ID NO: 3937 - DNA, 366 bp, Bos taurus
  unsure (131),(240): unsure at all n locations; Clone ID: 51-LIB3058-043-Q1-K1-E4
gctgtgcgcatgcgctaggtgccgagggttgcttgggggcctcgcctgggaaagtgaggggaccagcgacaaggggccctcaggatgcgaccggaggctctggggtcggcgtggaagaggaagccggtggngcgacgccctcaggagatgcggcccccagacctgaggaaccggcgacggcggacgcccaggccgcgcgcccctacaagcaggagccgggcagccccctgccggcgccgncagacccgccggcgcccggcctgcccgccttcctggcggccccggccaccgcgtcctgccccgactgtggcaaggcctctctgaagcctgcgcacctgctgcgccaccggcagagccactcgggcg

SEQ ID NO: 3938 - DNA, 300 bp, Bos taurus
  unsure (35): Clone ID: 51-LIB3058-044-Q1-K1-E4
gggctctatccccagcgctctccctttttaatccncaagctggaaggacgggacatgggaaccacttacccgattgcgcgaccctgaagcccaacttccctaccagaaccccgtgcccagcattctcaatacacccggctcacacccttaccattgtctaaatttccatgctcagcatgcttgctcccaccatggccacatgcgcctcctgcccgctcctggtcagctgctacctgtagaatacctgtgcattgccatatcacccttaaatatcctcgaagtcccatgaggttcaagggg

SEQ ID NO: 3939 - DNA, 134 bp, Bos taurus
  Clone ID: 51-LIB3058-048-Q1-K1-E4
ttacaatccaaaccagtaacctcatcattgtacgtagaggaatttattaattgattgagaaagtgacaaagcagcagtgaacctctaaaccaaattggccgcttatttaagaaataaaaagctggtagaactgc

SEQ ID NO: 3940 - DNA, 381 bp, Bos taurus
  Clone ID: 51-LIB3058-053-Q1-K1-E12
aaatttttaattaaggagaaaatgatcagaatgcatcacatatgtcataggtaaaaccaaatcttggcttctaataccacttccacaaaaaaaaaccacccagctgattccaaggctgggacagggtaagcacaagatggcgctggggcatcttgttaggccagaaaaggaagtgttaagaaacaggagcatgttacaaggatgtgggaccttacctaaataatgaattagaaccattcagagagtaatcccaagtccataatgaaagttaattaaatgaataaataagaaagaagggctttgggaactttcttggcagtccaagggttaagactccatactttcaatgcatgagatgcgatttcaaattcctgggttggg

SEQ ID NO: 3941 - DNA, 432 bp, Bos taurus
  Clone ID: 51-LIB3058-054-Q1-K1-E4
tcggaaaatgaatagtatgctatataatgtaaaaaaaagcataattttggagaaatgtggtgctgttatggctacagttgtaaagagcgtcccaataatactttctcatttgaagtattaaataactggttttgagaaatatgacatagaatcaaataggagataaatatactccaacaagtagggtcaacaataaataatcacttctaaagatttaggagtattaccaaaatattcattcattcagaaaaagaaaaaaaaaaaggaaatgtgcctactgtattcccagggtttttattgcttaggatacagctactcagcacaaaataaactccctgttctcaattcctatgttcttgtgctaaaaacacatccaaagtaaaaattatgttcatctctaaacaaaccagctcattttatagctttatttta

SEQ ID NO: 3942 - DNA, 268 bp, Bos taurus
  Clone ID: 51-LIB3058-056-Q1-K1-E4
gtctgcaccagctagtgttatcttgttgtggaaggttcagcttcttaggaagcttgggagacctgaagtggggaatcagagaagagggcggtgccggagcttaggccttgtaccgctcgctgaagagctctgcttctttccaaaaaaggagcccagagaagaactggtccttttctgcaaatatcaaagccatggctcaagagtcagtgatgttcagtgatgtgtccatagacttctctcaagaagagtgggaattcccggatgatga

SEQ ID NO: 3943 - DNA, 418 bp, Bos taurus
  Clone ID: 52-LIB3058-001-Q1-K1-E12
ctgcggtaatcaaacagcgcagcactggcataaggacagacacagacctacaaagtagagcagagcatccagaaatagccctcagcgtacgagcaaggcgcccgggcccaggcacagcggagggctgaaactgcgagttttggtgactttgggcttagcggggcctgttgtcttgtttttcgacaatttcctccttctgatcagtgtctcagactgagagaggcgatagaaatttaggctttagcgctactctcagctaccgctctggagcccttgcagtttctgctgagcctctgtgcggtgctcgcagctcatgatgtcagattcacattctttaactcataattcattcttttcctgacgtttcagtctcagggagatcatttgcttgctggttagtggctgcaaacatgcattt

SEQ ID NO: 3944 - DNA, 218 bp, Bos taurus
  Clone ID: 52-LIB3058-002-Q1-K1-E8
atcccggtcgacccacgcttcgtccttgccccgccgactcgtggtccttttctttcgccgccgacgtctctttcacgagttccggcggtacctcagggcgcaggaacgacctgctgcccaagtacggtctcccgaagggctcatacaggactccgtcacctactacagcttttactttccactgtcgccttctagatccaccttgtcagcacctgcta

SEQ ID NO: 3945 - DNA, 299 bp, Bos taurus
  Clone ID: 52-LIB3058-004-Q1-K1-E8
gttaaacgacgggaaccaacgaattgccttgtccatggtgcttcaactgctacagatcagggctgacaacttgtcggggcaaatggtcaacatggcatgcatggcaaaatttacttgatccatctatgttgctgccagcacttgaccagaaacgatattttatgttaacaaaggtgaatttcacatcctgtcattgccattaaaaactaattaggacaggaaacacgtgtgtatctgggtacatactgactcgaatattaagttcctgtgacatatcaccactgtcactgtgccaaacc

SEQ ID NO: 3946 - DNA, 447 bp, Bos taurus
  Clone ID: 52-LIB3058-005-Q1-K1-E8
attcggtttgatctgaagcgttcttgtgctttttccttgcacattcatctcatgattgcattttctttaataatcatcgcccactgtcccgcactctgtttcacgagctggtgtctgctgtcggagggaggcctgcatctgctctcctgctctgctgactcctccctgaggactcgcctgttgggtgctggttgctgactcctccctgaggactcgcctgttgggtgctggctgtgtggggtttgctgttatcctgagcggaggtgccttgcttttgctccccagcagcagtggttgcccagatgccaggcatctaagtggtgcttcttacaaatttggtgacagtgtgtgagggcttgggttgcctccagaactatctccctgatatgggtgtctacacgcccatgatgggctcctcacgcctggcctggacaggctctgccggat

SEQ ID NO: 3947 - DNA, 297 bp, Bos taurus
  Clone ID: 52-LIB3058-008-Q1-K1-E8
cggctctctggcagaccttctccgattaaggtatcaccttacaagggcccaggtctgattgtaccttggacctttgcgtcctgacactgggattccaaacaggggctgcactgaatctttggatgacacctgtggccatggagatgatatcaacccctgggggtgtccttcgtaaatgttcctgcattctcactgtaccaggagtgtgtgaataaacacagacctacctgtgatatagatataacggacttacctgaagaaggagagcacgcgtcggatgctgtgtaggatccaagg

SEQ ID NO: 3948 - DNA, 434 bp, Bos taurus
  Clone ID: 52-LIB3058-011-Q1-K1-E8
tcgcgcaagcgtgcgcgctagcggtcgtcctttttttttttttttttttggcataagacacttttaataacattttcttattaaaaaaaaaaaacacagcagcgagctctcccatctgtccgtgcaccttgcctccccgggcgggggccggcaggggctgtgtgtggaggtgcggggcccgagcactctaggtgctgttggcctgctcctgctcgaatagggccatggccagctgcgcgcggccccccagcccctccaggttgctgaggcggcaccggtggtagagttcctcgctgagccgagggctgcagtcccgtagggagaacttttgcaccagccctggctccacggcccggaaaaggtggagccctgagaaccggaggaaaacatccatcacctccagccccttcagggcttccttctcttcctggcct

SEQ ID NO: 3949 - DNA, 440 bp, Bos taurus
  Clone ID: 52-LIB3058-012-Q1-K1-E12
gataattgttttgtcagctaagtttgttcaatatttgttgtttagagacctcttaaaggtcatgaatttaatctggaagcaaagtggtctccatttaaagtttacagatcccatcacaccacatattttgagttaaatatatctcaccaaagcaaataggtaaaatattgctttatctgccctgatgctatggatttgaaccacaaggattctccatacattggcttctgtaaagactaggagttgcctcagaaatcaagcttttcacatttatgttccttatacatgggatgctgcacatggtcaatttcagacagaagcaaattatatgtgaaaaagtaaccttagccaaatggaagtggttggtttgagaatttcttgaagtaagaacactgtaccatactctatcctgtgtgccataataaaatactgaaaaatct

SEQ ID NO: 3950 - DNA, 212 bp, Bos taurus
  Clone ID: 52-LIB3058-014-Q1-K1-E12
aatacaaccgcctcgactcttaccattttctaaattcccaagtgcagcatgcgggcgcgttccctgcccacatgcgcgtcctgcactctcctggccagcgtctcattggataagacggcgcagcagtcatctcacccttgaagatcagcgatgtccctgatggtccagggtggtctactctcctcgctcaccttctgcccttggacggcctt

SEQ ID NO: 3951 - DNA, 451 bp, Bos taurus
  Clone ID: 52-LIB3058-015-Q1-K1-E8
ggaacatatactgatagtttattattcttatacttcaaacaaagaaattaactcccagattaacatgtataaattttgccataaatagttgtgaagagagttactgtgttttcctaacaacaacctaagattaagggttggcaattaaacattaaaagcagattttatagccaatatagaactgcctactaccaactagagcctccagcctgaatgtctcaggttgctgatgttctcgcagatgttttatagagagaatttttacattggcagtaatatcggatgagataatctcaatcgctatcaatgattaggattatgtgaaccaggaattaaatcagaatatttctagtactgatcagttattctatcatgctgtcatatctagattcaatacttagtaatgattttattttcggggcccggctcccaatttctctgggtgatagaa

SEQ ID NO: 3952 - DNA, 371 bp, Bos taurus
  Clone ID: 52-LIB3058-017-Q1-K1-E12
cggaattccggtcgaccacgcgtacgccggcacaataatagggggaaatgctttgtgcagaaatggatcaactgagtatctggagtgcaagaaggaaaggcaactagacggtcgcatagtacaatcgtgtaacaagctggtgagaatgtgagaatgatgatagatggtgaagtcatgacgaaaactgtgtttttctagggggaagcccgtagctgaaagtatgatgtgcatactgctgagaacacagcagtagcttcataggtacctgggctcatgaagagactgaggctatacagaacagatggctatctgaactacactagatgcacctctctggatgatgagcctctaagctaggaaatggatccaaa

SEQ ID NO: 3953 - DNA, 250 bp, Bos taurus
  Clone ID: 52-LIB3058-017-Q1-K1-E8
ctcctctactgcacgaggtggtcttcgtgggcctttcactggggccaggcagaccttgtcttggggcccagcctgtgcgcggagtcctgggcccagcctggcatctgcagacacgtcctgagcctgcgggcccgtagtctatactgctgcctcgccctccatgccatgttgtcccaaagtggtcggcgacccagacgcgctttgaccatatagctcaatgaggcgagtgttaggggcaggcccagtcctt

SEQ ID NO: 3954 - DNA, 424 bp, Bos taurus
  Clone ID: 52-LIB3058-022-Q1-K1-E12
ggaaaaccctaattgcaatgatgggaacgactcgtctgctgccagctgggatgcgcaaggctcggaggccttcatctcagcctcagtcctgctgctgctgctgcgaccccccgggctccgccccccaccctgcagtggggcggtcaggacgccagccccatcgcatggcccacctgaggcagcgctcggatggacaggactccggcttgttcttgggctgtctggacggcgcagctcctggggctgcccacggggagctggaggcaggcgaagaccaccagcttcctctgaaagccgtgaacacccacagctgcgttggccagggccagtcccaggggccagaggcgggttattgcgccctggagcctggtctgagccggatgcagcggactggagcccgatgagcaaggagcgtgaggtgagt

SEQ ID NO: 3955 - DNA, 421 bp, Bos taurus
  Clone ID: 52-LIB3058-027-Q1-K1-E8
gaactttctggccagtccaataacctgttgcctgtgttcctgaaatccttcacatctaactacttgctttgagagatatgacatttaaaaaatttttgattttatgttcatcatgaatttttcattaatttcaacttttgaaagtactgctttgaaatatgattcatctggatagcggagggttgttttggtgttttttgtgacccgcttaaattttacatccaaggcgagttgccccaccttatcctggcctgagctctgcctgcccctcacctgaacacactgagggcagacctgtgaggtaggcttgggttttttctggtcttccttcctttcaggttctgagttggatggtgaccctggaagtgtctgcataggaatgtgttggcttaacagcagtgagacactgagggcagttttc

SEQ ID NO: 3956 - DNA, 276 bp, Bos taurus
  Clone ID: 52-LIB3058-028-Q1-K1-E8
cggacgcgtgggaatgtattcattttgtaagtcatgactactactcaattgaaaatggatcttcctttcagagtggccaggtttgcagtgcctagcaagacactgtcagtcagggccatgtgacctttggtaggttacttaatctttttgagcctaatttttctcttcagttgagtgggagctacccactatataggattactgtgcattgccctctctttggtaatatagaaagatgttttacattggagctaatctaccacttaacagtttttt

SEQ ID NO: 3957 - DNA, 399 bp, Bos taurus
  Clone ID: 52-LIB3058-029-Q1-K1-E8
gcctttcctgtcttggatttgactcccagagatgctgtcttgtcctcttaggatcatctgcacctgcatgcacagtgcaacaggactggaatctcttctctgtggggtgcagcttccgggtcccagagcacaggggcccacagacagcaccagtgcccatggcttgacctcctgtctctccgcagttttgtgatggtcaacagtgttgcactggaaggggacggctgtgacatctgctccagggcagaggctgagctcctggaaatctctcactggctgaactgctctcgggaggagcatagcccccgtgggtgtggagacaggcagcggctgccggcctcggcccccattctgctacagcactttccgttttaccggagaaatgatgccaactgctct

SEQ ID NO: 3958 - DNA, 184 bp, Bos taurus
  Clone ID: 52-LIB3058-030-Q1-K1-E12
atcgcgagcggccgccctttactctaatcccactaaagctgaactagggcataatgcgttgtcaaggagactatgacattagttattattaaaaaattttagaagggggaagcagtgtcagaaataggagaatagaagcgaagagtctaaatactaaaactaatatagctatgcaggtatatac

SEQ ID NO: 3959 - DNA, 137 bp, Bos taurus
  Clone ID: 52-LIB3058-030-Q1-K1-E8
cgagtcagagccacgcgtccgatctcctgaagccctcccaggccgggctctactcgttccaggctacaaatgccacatgggaggacagcctgacctttgatctgacgctgctataccaccaggaagtagaacaaatg

SEQ ID NO: 3960 - DNA, 203 bp, Bos taurus
  Clone ID: 52-LIB3058-031-Q1-K1-E8
ctcctttgcaaaggagatgaccagcatttcaacagtatgtcttcctggaagggcagatgtctgctatatcttctttgtctgcaccaaaagattccagaggaatgtggacacatttcatgtcccacttgtagagcaaagcttcaagtgaccagtcagcactgaaaaaaatatattacttttaaaaaaccatataatttaataaa

SEQ ID NO: 3961 - DNA, 401 bp, Bos taurus
  Clone ID: 52-LIB3058-032-Q1-K1-E12
tgacattccaaagcattcaaaaacagattttccctgggaatactaaaaattgttaaagacccactatcaaactggctaagtccctgatagcataagtaaaacaagtattaaagagcaaaagtgtcacccctctctcaaaaaataataacttgggtcttacataaagcatgagcttttagtggtcaaaacagaaccaatctgaaatttcctcacccagcatagtctccatattagaaatgtgaattttaaagagcggtagatgctttgaattctagaaatatgtggtacatgtgtgaaattgttgttgtatctaaaaatttattttaatgtactatttagctactatagtatattatttttctttaaagttgtctctttatgttttgctttaattttttatt

SEQ ID NO: 3962 - DNA, 274 bp, Bos taurus
  Clone ID: 52-LIB3058-034-Q1-K1-E8
gattccggccgacccacgcgtccgtccgtctggccctgttcaaagctccgtacagtagggtaagtgacgcgatcgtgaggggaatataatgtactccaaccccatacagtcagacctactccttaaccttcagatgaacaatatgaagacgtttctagaacgggatttgccatatgactcagcacaaaagtgcttaccttgtagctcatctgagaagaatacgactgcaatgacagagactctgatacgactgatctgctgctaaaatcatttt

SEQ ID NO: 3963 - DNA, 94 bp, Bos taurus
  unsure (37): Clone ID: 52-LIB3058-035-Q1-K1-E8
tttttatttctttcttttttcaataaactccaacaanacataactcaggagaggcccagaaaaaagatgggcaggccgaccatagcatggacaa

SEQ ID NO: 3964 - DNA, 442 bp, Bos taurus
  Clone ID: 52-LIB3058-037-Q1-K1-E8
cgcagatctattgtatttgatttatattcatttgacaattattagtgtgaccaaagtattaggcagttttcatacatttttcaccttgtacaaaattctgaattcatttttcttccaggttgacaaggagttgtaggattgaaatgccctctaagtgttattttggttgttctaacttacaaaagtgattttgaataagaaatatttggtgttctttttataaccagtttttaattggtaactgttttctgtattgtttaaaaacggatcaaaaaatgtaagtctattggtagagattaagtatttattgctacaacttagttgataattgtgttactgtaaagccatacgttctgttaaagtcttgtttgcttgaactgtttatccctacaggtgaaacactagaatattgtgagtgtacatggtttgtgggttgggtttt

SEQ ID NO: 3965 - DNA, 409 bp, Bos taurus
  Clone ID: 52-LIB3058-038-Q1-K1-E12
tgatgttgccccctcctaaaaaattggttttcgaaacgccatctctgaaagaggcttgctctacacccactgggtgtgagtgttggatgccagggggtagggagggacacgtctgctgtgagagtcttagacatgtgctgtttgtgttccctgtggaggctttgccatcgcctccagggctgggcagagagtggagtggatggaaggaatatggaatgtgctttcctggctgcagtgaggactcggagtcgactttggtgtgtggagtaaatgtaggactactataagattaatcggacgggtctacaacgaagttctatccacgtagaagtcctagcaggcgtctgtagcctacacttgtcacggtcacattagtctgatccttggtctccttgaattacactagcat

SEQ ID NO: 3966 - DNA, 232 bp, Bos taurus
  unsure (29): Clone ID: 52-LIB3058-040-Q1-K1-E8
gcgcggacgcgtggggttttagctttttnatacataaaaagtcaaaaaaacaaaaacggacgttcagtttcctggtgtgatcctggctgcaatggatgatttttcactgaaagctgtgttgctgttacacaaagtgggttgaatcatttatgaatgtgggagtgagaattagtgggttggctatgatctaaagtcatgtcttttttgggtaaactacataaactggaaaaac

SEQ ID NO: 3967 - DNA, 218 bp, Bos taurus
  Clone ID: 52-LIB3058-041-Q1-K1-E12
gacccacgcgtcccgctgttttttttcacggccactgtactttattggggccagacacacaccatcggcctcgtccacgggctctcgcgcccagggctccctgccacatggggaacccgacacacgcaagggggcacacattcccccaaaaagagaacaaggagcaacaccacaaccctaacactgggatggcagggcaagccagcccaacggggcct

SEQ ID NO: 3968 - DNA, 418 bp, Bos taurus
  Clone ID: 52-LIB3058-042-Q1-K1-E8
gtgaagtgtttcccgggccactcagtgtttttacctctttcctacttttgtacgggtcatgggagtggtgagggtggaccgtggagacgagcagacctggtgggttttgaggagaggtgtcagctaatgcatccagctgtttgaggggtggcagaaggatgccaggtgaaggagagcagcctccacagtgacagcggacttctgtgatgaaagacagaagggggcagcgggccaacaaggccatatctcagtgagcgggcgaatgggacagctggtggcctcttctgtagccacagggaatggtgtggtcatctgtctttgtggcctggatcagggctgggggccgtgggaggtgcatggaggagaggacgtgggccccaggccctttcccctcgctgaggggatggcccgctgcccc

SEQ ID NO: 3969 - DNA, 323 bp, Bos taurus
  Clone ID: 52-LIB3058-043-Q1-K1-E8
tacaaatcaaagccctgaggcattttggtgaggttatgttcctgtgggcagtcctggggtctgagaatgagccagggcggattggctgagcagggcatggtctcaagagggctgatgggcatgggctgctgagagcttggaaggtggaaggccaccctagcgctctggggtgtgtgtgtgcgtgtgggtgcaggggctggtctgtaacgtgagattgcagggtgagcacctcagaggatcccgtctgggctgggccaggctgggcaaagcatacaacatggttgccgcataaataaagcttgggtccgggcagggtgggccct

SEQ ID NO: 3970 - DNA, 386 bp, Bos taurus
  Clone ID: 52-LIB3058-044-Q1-K1-E12
aaaagacacacctgccacattcaatgtagtgtctgtctcctagtcaaaatagagaatgagagtgggtgtgagacttcgcagaaccttgagcattgagacagtctccaaagccttacttgagtgagaagcccttacactaacaagagtcaaatatagctgaagcatcattctaataatctttacatgtatgaggttatatgtagaagaaaaattttactactaaatgatttcaactattgactttctatattttgaaagtaatgatattgtattctttgtttttttttttttaccggtggtttaatacaaaatacatggagcttgttttcctctcataagtagcgttagcttcgatgttgacttcttgaaaacaggtcttcaacagc

SEQ ID NO: 3971 - DNA, 229 bp, Bos taurus
  Clone ID: 52-LIB3058-048-Q1-K1-E12
gtgacctctttctgtttctctctatgtaacattcttaaacttgccaaatatcacattgcttctgtgtaacaaatgtgacatggtggtgacagtccatacagcgtttctatgattaattgtgacaagataatggacaattaaagtcagtgcagccaaaaggattttatttcgtttttatgttcacttggagtttcctttttgtacataagaaaataaatattggatttgt

SEQ ID NO: 3972 - DNA, 295 bp, Bos taurus
  Clone ID: 52-LIB3058-048-Q1-K1-E8
ctgggggccccaagcgataatgaccaatgagcagcacctgccccgcgagggtccatctgactctgacccagcggctggaccctgcgtatgtgtcgatcccgcccgccctgaggtctcacagcgaagccagcagccccggcccggccctgcgctcggcacctcgtgaacactaaggaggccgtggttcggagtcaccccgctcagcggccaagctcccgcccgccgggagagcccgcagctgcagccgcacctgcttcctgtcatgacctcaggaaataaatttccttgactttat

SEQ ID NO: 3973 - DNA, 427 bp, Bos taurus
  Clone ID: 52-LIB3058-049-Q1-K1-E12
ggggttcccattagaaatgccgtgtttttctcttggggaaatagaccctttcacctggagcaggttgttaactgaggattttaaacctggaggttcttcctgagaatgtatatttctgaaagtatgttcattaatatcccaagcatcaaagtctaaataattttctcttcagaaggttagaattgggtagatgtattgttggatataggcatggtaaatttaactgaggggttgattcttgttaattatggtataaagatttgtatcctggcctgcttgttcaggtgagagatattctgtgtaaatttgaggtatagcgtgaagtcttaggacaagagttaagttcttttttggctcattcacagtcacttatgtgttaagtgttaacatctgtcatgaatctgccaatgtgtatgtgttaaacggc

SEQ ID NO: 3974 - DNA, 275 bp, Bos taurus
  unsure (53),(62),(90): unsure at all n locations; Clone ID: 52-LIB3058-050-Q1-K1-E8
gacccacgcgtccgcgaggactcggagggcgaggagaagagcgacggggagcngggggggcncacggacagaggccggcggcccgggccngagcctactccctgcggagacctgggcgcaagcgccagagccactgagacttggactcgggcctgccggaagatgggcacagctgtgcgtgcgcagatgcctgcgccatgggagatgacccctccggacacccactgtgggcgcagtgaggtgctggtggcctcgagggttgatgggctgggctc

SEQ ID NO: 3975 - DNA, 272 bp, Bos taurus
  Clone ID: 52-LIB3058-057-Q1-K1-E8
gtcagaccattactctgcactttttttttcaaatccctactatcttacttaggggggtgctctgctcatggagggtgcttcttagtctatttttgtgctttttatctccagtaaatggatatgtacacttgcgccctgctttgcccgctgcaaatccagctcgattgtcctgccctgctctcctttcacctacacatatagttcccatcctctttgattaattctcatatcagattggtgtcaggacaaaaaaacaagccctgacaaaccta

SEQ ID NO: 3976 - DNA, 329 bp, Bos taurus
  Clone ID: 52-LIB3058-058-Q1-K1-E8
cggacgcgtgggtcggtgcttcatatgaaatctaacagatggccatggtgcagtcatgaagggttacatatcttgtgagtgtgtacataaaaaaggcaaatttaaaaaagacaactggtgatctaaatattatgtgtacttttgaaaatttaaaatctaccatatttttaaaagataatgaaataacctagcaaacataaaatattgtgctacaaaagataacaacatactaggtatatctttctcagtaccacccgaatatgacttatgacaatattctcattttttcacattctacaatttaaaattgacaaatactattatatata

SEQ ID NO: 3977 - DNA, 171 bp, Bos taurus
  Clone ID: 53-LIB3058-004-Q1-K1-F10
gatacacaaggtgatatgaactactgatttgcatgaggagcttcaggtcatagaggctaacggggaaaacttgaccaggcatgtggtatacacaggatagatgacttagtcgatagcatgtaagtttgtgccaagtatcagagtgctatgagctctgacagctgttcacga

SEQ ID NO: 3978 - DNA, 445 bp, Bos taurus
  Clone ID: 53-LIB3058-004-Q1-K1-F2
agcggccgcccttttttttttttttttttttttttttttttttacaataaaaatagaaaagagttttatttgagtcaaactgaggactacagcccagaagacagcctcccaaatcattctgaaaaattgctccagagaagcatggttttcaacagttttacgtgttgtcagaacaaaacgttaaacacgtcagagatatgtttcttcaagttttcaaaacaaacggaccgccatgcattcacaatgcctcggcagttggccttggcacctgggaatgaagtattactgatggagtgtcagcactggcgtcccaggaagggaggcagcacgtgctctacttctggcccagatgcccttttcttttctaattacagcagacttgtgtttgataggccacaaacaagctattttagttcagttcagtcgctcagtcgtgtcactcttt

SEQ ID NO: 3979 - DNA, 420 bp, Bos taurus
  Clone ID: 53-LIB3058-005-Q1-K1-F2
tcgcccacgcgttcgggcaaaagaagagatattcagaccgctagaagctagatgctgcatgagttgaaagtgacattggggcactgagataatgcaaatctatccctggtcactgcgatccagggaagtactggatctgaatgttttgctcatgaaggctgcaagggaagtggtgctctagactagaaggcagcttcagttataatttttttaaaaaggtagaaaatgtatttattgaaaagtttgaggccatagccgagtgggttagcatacacaggagatgtgttccacagggcaatgttgaaaagattctaggcaagggaatgaggagtgttgagaagagtaacagggtagctgaggatggatataccagaaatgtaaaggagagctgtgattaatttagcagaaaactccttgggc

SEQ ID NO: 3980 - DNA, 400 bp, Bos taurus
  unsure (387): Clone ID: 53-LIB3058-006-Q1-K1-F2
cttaaagcacttcctttcctaaccgatcacagtggagcggcttcgcggcgggagctttggtacgtggcaggcgggcgggcagctgggagtgtcccgtgtggtggccgcggctcacaccccggaggagccggatcggcgcgtgcggagaagggacgcggggcggactcggccgggcctcgcggggtcccgcgacggcgcaggcgcgcggggaccgcagctgcccccgcgacgacctactttctacggagcccggccggagggcggaggcggcgcagctcagagcggtggcaggacgttccgggagcctcgcggtggccgtggccatcgcgagcgcgaaggtgacaggtggcgtgctcggcacgccggtgcgcacagcgaacactaacncttggggagagat

SEQ ID NO: 3981 - DNA, 323 bp, Bos taurus
  Clone ID: 53-LIB3058-007-Q1-K1-F10
ctgacgcgtgggttagatctccacacatgtatttacttaatcatatcgacatgaaatcaaatgtgaagacagacaacacatacgttcacgggcctgacatttgtggcctttgcttaaatttttatggcttcgcatgaatagtccttctgactaatacgctgaagaaaaaattacaaagtatataacttctctttgtgataagacaaaagtacttctttgtatgtgccttacgctacttttctcagaattagctttgaagatgaagaactttgcagagaacaaccatacacataaagttgaataacatataaaaagactaagat

SEQ ID NO: 3982 - DNA, 375 bp, Bos taurus
  Clone ID: 53-LIB3058-007-Q1-K1-F2
acgcgtgacgcatataggtgccctaatttttatgaaccctttcctggtactaacctggggccccttgatgggtcccttcgcttataggtagatgcgtacagccagggtattcatgggactttaatgtagttacttgaggtaagcttgtaaagctatgaaccttaatctaaccgctgaaaccactgactcccataggtccccaatacgagttataattgtgattcattaatatctatattaagattcctattcccatcacttagtgaagtcgccgattatgtgcaagcatgttgcacaggctccatagggcggaattcccaatagatgccgcccgtaatgacgcgtggacatctaatgacactgcattctaagcat

SEQ ID NO: 3983 - DNA, 320 bp, Bos taurus
  Clone ID: 53-LIB3058-008-Q1-K1-F2
acggttaacaatgggctattgaggcagagcgtatgcactgcatatcactttacaatgtgcgtaacgcactctatatgaaggcacgctttggaaaatcttgaagctgggaggacgactataattgctatacagcgtagtatttggatctgctgtacagcattgtgaatcagccatatgtatacatacattcactcactcttgagcatattttccatggcaacctacatgccatgacagaggttagctccctgtgctttacagcaggttaccaccagctatctgctttatacatggcagagtatatatggcattgctacgct

SEQ ID NO: 3984 - DNA, 375 bp, Bos taurus
  Clone ID: 53-LIB3058-010-Q1-K1-F2
tcggtgaggtactagattcagccactaggtggtgatgcactgcagcttgactattaaaaggggcacaggaccaccgctgccgaagatttgtccggtctgtacgccccaatcccttcccttcaattttcaagatgacaccaccttataagaggttatatggccttacgagaaattactactcagctatatactgatgtaatgtaaaataatatacccgagagttgtagtatatggtgtgatatataattacgggattatatcacttcaatcagttgtgactcatattcccttttatatgagtcactctttttaaaaacaccagactcctgtatgagcaactcctaatatagtctaaagatgttaaactacatatat

SEQ ID NO: 3985 - DNA, 355 bp, Bos taurus
  Clone ID: 53-LIB3058-012-Q1-K1-F2
tcattcttcaccctttctaattctgcccctttagtttaatactttttcctagtttctttgatttgtccattgctttcttatggtcctgtattcaatttctagcacatctgtgatttttctccacttacacatatttgcactgcttacacttatgtgcaatcttactccttgtctgcacacagatgtggaaagctagatataaaataaatgttaaagcttgatttttataaacattttaatatgtagtttggacatgatttattgaattaaggttctttaaactgaaagttgaatgcatgccttccgaaaatggtttggctttcgtaattctgtaataagcatttcattgagaaat

SEQ ID NO: 3986 - DNA, 98 bp, Bos taurus
  Clone ID: 53-LIB3058-014-Q1-K1-F2
ttagatcgaaagctatcacatttcattcttctaatactctatctctgagcagatacggtatcatctcagcggtttcttagtagtcatctatcccatct

SEQ ID NO: 3987 - DNA, 398 bp, Bos taurus
  unsure (381): Clone ID: 53-LIB3058-015-Q1-K1-F10
ggcattctggggattgtagttccgggctcgccgcgggggacgcctgctctgcgctcggccgcgctctcgtgctccggaaggaccgagcggccccgcggttgccatagcgtcttaatcccgtagcgagagggaggcagccctgctaggcgccggctagtttcggcggcgacgcgcagcggcacagcggaaggaacccgcgcggcgggcctggggagccaggggcggagcgcgagcgagcctggaaccacggaggcggcgggagcgggcccagcgtcttcctcccggttgctgagcttagctgctcttcccaagcccactcccacgctctagcaagcgtggaagaatggaggtgagccactcagtgaaggagcggaccatctncgagaacagcctgatca

SEQ ID NO: 3988 - DNA, 54 bp, Bos taurus
  Clone ID: 53-LIB3058-016-Q1-K1-F2
gaagatctgtgcctttacaattaaaagtgcagtagcaattcctggtaattcact

SEQ ID NO: 3989 - DNA, 441 bp, Bos taurus
  Clone ID: 53-LIB3058-018-Q1-K1-F10
ggataaagtgtcatcttcattcaatgtcaatagaaattacttgaactaaaaagtggaataagtttactttttcagcaatgctcttagaatctgtagatgtgattgaattgctttcttattggagggaaagttgaatttgctgttattttagtttgtcttttcttaactgtgcactacttttttggtttgtttttgatggaaaaaggcactactgcacacgggggacaccaattcagaagtgcagagacatgtataaaaatataaaggcaatgcaaactcattatctttaatatacatttgtgtgtaaaagctttacagctttgtaaattttaatttaattctgaatttagctttaatttttaaaggggcatccttacctcaacaaaccccaggctgatgccttgtaagttctacacaggctacacttttcttgacatcttc

SEQ ID NO: 3990 - DNA, 462 bp, Bos taurus
  Clone ID: 53-LIB3058-021-Q1-K1-F10
aatttgtgtttttagagtaggagttggatttgaaggcaagagaacttatcaaggatccaggatcttccccaaagctctctccaagtgggactcgactgtacattatgacagacgtaccagtgacattcagtcaggtggagtgtaatggggatacaccccctgaaaacggtcaacagaagattactaaaatcacagaaggagccagtgacgtggatggcaccccaccacactgcagggtagaacctagactggatgtacccacagaaagaaatcaggagaaaagtgaaaaattgcaagaggacatactgctcagctcgtccatggatgagaagattctgaaagaaaaaccagaagagaagctctatgttgttcataaggctctcacagatctttctctccaagaagcagctgttgataaaatggcattgagagaagggcatcagtgggagaagattcctttga

SEQ ID NO: 3991 - DNA, 55 bp, Bos taurus
  Clone ID: 53-LIB3058-022-Q1-K1-F2
tcgtctagatcgcgagcggacgccatatttttacgttctcttgactggatgctct

SEQ ID NO: 3992 - DNA, 392 bp, Bos taurus
  Clone ID: 53-LIB3058-024-Q1-K1-F2
gaacagaccaggtcatgttgcagacatttaatattttacgctatactcattagtactaattatcattttatctctttgtttttgtatctatacaatccatggcaacactgttactagagtgtagagttggcctgaaaagggagaaaagggcaaacattcatcttggtgtctgcatcattttaaatcttgacatgatttaaaatgggtgggaggaagagcacatgtctgcctaccatgcagaaacaggccagcctttgaggcaagaggtcattccacatgcatcacgtgacagaggccatatttaaataggcacaccagatcacccatcacagagacatttatgcccttcgtgacaatcaccaaactatgtgacagatagtacagttggatct

SEQ ID NO: 3993 - DNA, 442 bp, Bos taurus
  Clone ID: 53-LIB3058-025-Q1-K1-F2
ggtgtccctggctcggccctggtgcaagcctggttcacggactggtcgcagccacacaacccagcagctgcatgttgacaggtgtgagaatgattccagaactagaagagatccagaaaggtaagcagtactctcgggtggacatcataatcacaggcaaagataaactcccgcgttatgcggagcgctgacgctgcatgatgcggtttgccgcaccccgggtggtggtggacactgagaagtgagaggggagaggacgagtaggtccggattttcctggaaaaggaggcgtggtcactgctcctgcagggattttcccactccaccctggaagaggagaatgcgtaaaggcctcgtggcctctggttagatagcgggagaactggtgcgaaccacgcgcgcctcgccagctgaccggtccaaagcccgagggcgcacgcgg

SEQ ID NO: 3994 - DNA, 442 bp, Bos taurus
  Clone ID: 53-LIB3058-029-Q1-K1-F10
cccacgcgtccggtggagttctctttattgtggcgtttcctcgctgtgtgtgagtttgtacaggtggcttgtcaaggtgtcttggttagggaagcttgtgttggtgttctggtgggtggagctgtatttcttctctctggagtgcagtgaagtgtccagtaatgagttatgagatgtctatgggatgagtttggggtgactttgggctgcctgtatcttggagctcatggctgtgttcctgtgttgctggagaatttgcttggtatgtcttgccctggaacttgtcggtccctgtgtggtgcttggtttcagtgtacgtatggatgcgtttgatgagcttctgtcaattaatgttccctgtagttagcggttggacttagcctactgcttacagttatcggtcttatttctacagcagtttcaaagcttgaccttttataca

SEQ ID NO: 3995 - DNA, 236 bp, Bos taurus
  Clone ID: 53-LIB3058-029-Q1-K1-F2
attatatatcacttactgtgtaccactcattggactggggctatataaatgggcattggttatagtcctattccctcttatcagtcccattaagtatgatttactgtaggggaaattgaggcacataccattattattccattagtatattgatgaaataattgatttgagtcacatatatataaattttttcgctgtttattacatgaaaatttataaaacttttacatcttttt

SEQ ID NO: 3996 - DNA, 400 bp, Bos taurus
  Clone ID: 53-LIB3058-035-Q1-K1-F10
cggacgcgtgggactccataaaatccttttttttaaacaattccaattcagattaccgagtctttttttaagaagggaaagggaaccatcactgcaggtttgcggcttgtgtgttagaactttcagtgagcccaggtcctgggtgaactgtgggaaatggtttcctctgaattgggaagaaatgcttggcctggcttcacaaggctggtggggctgcttcagctggtgcaggcgtttgcccgttacagtgtcttctctgcagatcacaggctccttggaacgttttgaaccatggcatccatcttggcaaaggctgccagcccggctcctccttggcagagtccagggttccgtggcctctgtctttagaggataaagaatcagactatcgacgtgggga

SEQ ID NO: 3997 - DNA, 247 bp, Bos taurus
  Clone ID: 53-LIB3058-035-Q1-K1-F2
ttggttttgttttttttttgtcttcaatcatttttttattccaccacgtcagcctaccgaccctgtccttcctgccaccccgaagtctccacttgggccctggctcatctcgcctcggccacggcggttctgaaggcggtgctgctagccttggcagggtgacctctcggaggctgagcctcaagacctggcttcaagggtctgggggcacctgcaacaagctccttgccgcggtcctcggtctggg

SEQ ID NO: 3998 - DNA, 134 bp, Bos taurus
  Clone ID: 53-LIB3058-036-Q1-K1-F2
ctcgtccgctgtttttttttttttttttttttttatacccatccttttttttttttttttaagttggcggggggaatttaaaagaaacctacccatccctggctcctgttcattaaattacttttcctttaata

SEQ ID NO: 3999 - DNA, 198 bp, Bos taurus
  Clone ID: 53-LIB3058-037-Q1-K1-F10
gttgaatgaaaggtcatctttgacgtaagtccaaccggaattaaatgtaatcacggagactcctaagtagtgctgacatttaaccaaaatcactctttaagaaatactaactcatcataactgttttactatgaacatcatttatctcatttcttaatcttatacgatacatttatgtttttattattatacatattt

SEQ ID NO: 4000 - DNA, 314 bp, Bos taurus
  unsure (86): Clone ID: 53-LIB3058-040-Q1-K1-F10
cacgcgttcggtgctagatcgcgagcggtcgcccttgcatcattcccaccaccacaaacccacccagcgcgagcattttaaaaacncagggcgaccccccaagaggggcagaccgactaaaaaagggctgcaactattggcaacttccggataaacaaagcaccccgaagaatttgaggggggcaagggcagaacggagaatcggcataagcagatatagtaatttacccttgaacttggcaaaccattacacctgaggccagtagcaagacgcgacacctgtcccaaaagcccccctaaaacacccactctct

SEQ ID NO: 4001 - DNA, 298 bp, Bos taurus
  Clone ID: 53-LIB3058-044-Q1-K1-F2
caggaatataagaagaaatgctgtagttttcagaacaaattcactatcttataaaaggctgcgtcggtctctggacctaagtttgtcatcatctgctgccttccctttgactctggaattccgactgcacagggtacttgctcacggcaccttcgaatcttcgtgtgaacacacttccaagaacttcagatgctcttggcactctgatcagaagccaggcacacaggatcggtgtgagctgcaagcacggctccctgttatattaaccatgaactacctgcttttgcaagaagtacca

SEQ ID NO: 4002 - DNA, 395 bp, Bos taurus
  Clone ID: 53-LIB3058-048-Q1-K1-F2
gcgagcggccgccctttattttttcctatgtttcgaaaagcaatttttattgaagaatttggagggaaagtctcataatagtaaaaatactaaagttgagtataaaaaaacgccttggtgcagcgcagcgtctggccaggaggcgcacagggcgcagcaacggcccctgcagagggcgccaggcagggccggggcaacagcgggagtgaagcttctagaaggacaagtgctaccggggggagccatcggagagacggtcccagtgggaaaggggtgcagggagggctttctcctgagatcagaaaccccagtacgcacagacagcgataggtggcacccggcccctctatcttgccagagccccagcccggcctgatcgtgggggccaccctcct

SEQ ID NO: 4003 - DNA, 421 bp, Bos taurus
  Clone ID: 53-LIB3058-051-Q1-K1-F2
gggcaagtttcagcaaagtatttcttcattgttttcccggtgtcctggtcctttctgatgggcattagcacttgccatataatttggagtttgggagaatgctgttgttaacactttatttttattttgaattttattttgaatttttcaaagtccccaaattataggaaaagctgtgatcctcataaggttagtctctggtggaaaaatgcatattcctgatgcacttgtcttggtattttttttcttatttattttttacattaagaactttggtgatattctgaaactatttgacatgaccttattttgaaggtagccacatagacttctgcagtctaacttattttacctctcagttggagaaataacttttaagccatagatttttgggatcacatatttattatggtcacatatt

SEQ ID NO: 4004 - DNA, 307 bp, Bos taurus
  Clone ID: 53-LIB3058-052-Q1-K1-F2
aatattcgcgttggttaatagtcttatgcttttaacctctcaaaatggttcctggatgctggtgaagctctgatttgtcttgttaatggccgcgatggctaccactcccctggtcagaacatgcctggccaactccactttggcgaagtggcctttacaaatgcgtgaaggagctcataattctcaatatgaaccacccttattgatcagatggccacgaaggtcacattcctaactatactaactaccactgctgctgctgctgctgctaaatcacttcagtcgtgtctgactctgtgcaacccca

SEQ ID NO: 4005 - DNA, 308 bp, Bos taurus
  Clone ID: 53-LIB3058-054-Q1-K1-F2
tcccggtcgaccacgtcgtctcgcggactcgtgggatttggtgctcagctatactgcgatgcagatacctgagaagggtgtccttcgaaagggaactatcctgcattattgccgtaaacctaccaaatgccttaaaaaccattccttggtcaccattttcgcaattcacccctacagagtggtcttttttgttctgtcaagaccctggctggtacagatgcatgtatttatagatgtatactaatggtgagcttatgctaatggaaagatttgtgcctatttaagtatgtgtttatactatttacttt

SEQ ID NO: 4006 - DNA, 56 bp, Bos taurus
  Clone ID: 53-LIB3058-057-Q1-K1-F2
ctagatcgcgagcggccgccctttctttttcatgctactttttatcttttttattt

SEQ ID NO: 4007 - DNA, 419 bp, Bos taurus
  Clone ID: 54-LIB3058-001-Q1-K1-F10
aaaatacataaaaaatccttagtattttttattatgatcattcctttagagctagttgtatttctaatccatagtaattgtttcatttaattctattttataacagtgatccacctctgtcatattattgatattgtttacagctttaaaatagatttataatcagcgatacttgttaatgtttgtcgtaaaacataagccttatgtatttagtagttattgctctgtaatatgtgaagattcactggtactctgatcttctaattaatttgagagtttagactgtaagctccatgagggcaggcggtagtattcttctcatttttgtaatctgctctactgtgtgcctgcatagcgtagtgccatcgtttgatacgtcaggaatgttgtgttttggttgggccttctagtaagataac

SEQ ID NO: 4008 - DNA, 402 bp, Bos taurus
  unsure (195),(250): unsure at all n locations; Clone ID: 54-LIB3058-003-Q1-K1-F10
cccacgcgtgcgcggacgcgtggggtcggccgtcccaaaagaagcgcaaatttacaacccagtccaccacgggccacacaatcccaaatctaaccctccgacggcgatggggatctcgagcatgccggagccgcgggacagcctgctggggtacctggtgtacaacacggtgatctcgatcgcggcgctggcggngctggtgcgggcggcgctggtgttcctggacctgcaggccgcgctgccgcccggngacgacggcggcgaccgactggcggcgtctggcccgggactggcggagcggttcctcagggccttccggccggcgctgtacgaggtgctggcgtcgacggcgacgacgtgcgaggcggacggctgcgccgacggcgacgactgcagcgtgtg

SEQ ID NO: 4009 - DNA, 222 bp, Bos taurus
  Clone ID: 54-LIB3058-004-Q1-K1-F6
gaaaggtcatgtgattagatcattagaccatcttataggacatgtgactaccagcggatgcgcggatacacaaggtaataacaatggtgataggttacgcagatacttatgctgaagcctgaaggtatctgtccagtgaacgtagtctactcataactttttcacgaacatgtcatcaggatagccctaagttctgtctactcttggcctgactgcctaaac

SEQ ID NO: 4010 - DNA, 239 bp, Bos taurus
  Clone ID: 54-LIB3058-005-Q1-K1-F10
gttctagatcgcgagcggccgcccttttttttttttttgttttattttttttggggttgggtgttaattattggggctgttgtttttttcttttttattttctgatagagcagaacttttcagtcagtgcaaacaagcgagggatgccctggaaagagaagcattctaggcaacaacggaaaaaagataaccaacaacggaaaatacaggctaccaaccggataagccaacgcaaggac

SEQ ID NO: 4011 - DNA, 442 bp, Bos taurus
  Clone ID: 54-LIB3058-005-Q1-K1-F6
cggacgcgtgggggaaccatcactgagccgaggtcgtgggcaggggaggatgcacgggtgagttctaggggtcagtcctgagcgccccgctgtcctgcggggagactggggcgcagggcccgggccatagcccctcaggtcagccagcctgaggccgcggcctcgtcagggtccaaggccctgtctgggggcagggtgcctggggccagccagcctgcagagcccctgccccgcggagcgggcctgaggcactcacctgcatccggggcccccacagccatgggggcccccacggccactgcatcctggcctcctgccgtcccagtgggagcttggcggtcagggtgtcccctgcgcgtcaccgtctcctctcagcctaggcctgagaactctgcgcgtcggtcgtgaaggccggtctactggccggatgccatgggagcca

SEQ ID NO: 4012 - DNA, 276 bp, Bos taurus
  Clone ID: 54-LIB3058-006-Q1-K1-F6
ggcacattggaaatgatgtcatttagacttaaaacccttacagcaggacacttcaaactgttggactccgaacttgtgaaaatatctgggaattctaaaagtgacacagattcataacaagtgagaatccagttatatgtaattttaaaggcctgtcagtatatattttccttttgtctttattcctgttctttggtgaaaatttaaaaaaaaaaaatgaatagaaaagaatttcttccttagggttctttcaggggaaacaggatttttctcatt

SEQ ID NO: 4013 - DNA, 126 bp, Bos taurus
  Clone ID: 54-LIB3058-008-Q1-K1-F10
gtttttaataacgataaactattattttacgtgaattatattgactagaaagtggatgggaatattgatcagtcataattatagtttcatatctaatgtaacatatagttaaagtttattggattt

SEQ ID NO: 4014 - DNA, 430 bp, Bos taurus
  Clone ID: 54-LIB3058-011-Q1-K1-F6
aggacgcgtggggtcaacttccggggaccctgagacagacagaaaaatcaagaacctgaagaagaaactgagagcaattgaacagctgaaagaacaagcagcagctggaaaacagctagaaaaaaatcagttggagaaaattcagaaagagaaagcccttctccaagagctggaagatttggaactgggtatttaaagattcacagaaagcaagctggttaccagaaatcattgcaaacgtattttctgttaaacccatcagtgtacatagatatattcatgtgcccacatttaacgttcacttataattatgatcatttatctaagattctacatatctatacgatgacttaatatgtctgttaaattgatttttacatcctgcattctgtatcatgtcaacatatgatatcaaaaatagacattatga

SEQ ID NO: 4015 - DNA, 412 bp, Bos taurus
  unsure (346): Clone ID: 54-LIB3058-012-Q1-K1-F10
gcggacgatgccgcccggcggctggcgctggctgcgcggcctttgggctgcgggtcagcccctgttccaaggccgtgcgttgctcgtcaccaacaccctgggatgcggcgttctcatggcggctggggatggggcgcgtcagacctgggagattcgcgcccggcccggccagaagttcgacccgcggcgctcagtgagcatgtttgcagtcggctgcagcatgggccccttcctgcactattggtatctctggctggaccgcctgttccctgcatccggcttccctggcctcccaaacgtcctcaagaaggtcctcattgaccaactggtggcctctcctatgctnggcgtctggtacttcttgggccttggctgcctggagggccagaccctggacaagagctgtcaggag

SEQ ID NO: 4016 - DNA, 419 bp, Bos taurus
  Clone ID: 54-LIB3058-016-Q1-K1-F10
tgccttctggggtccctccaggtgcttgtcttcagaaaactgcagaggcggcttaacctcaggctaagcttgcattgggcctccctgccacccagcaggatcaccctccaccaaggagcagtcaggcccgcatttctgccactacctctcgttaatgccaaatggaagagattaagttgtgacatgagctgaatgccaaagcagcttctctctttgaaacaaatgatgagcactctgtaacagagggtattaatgtgatgaatgagctgatcattccctgtattcaccttatcattaataatgacatctccaaggatgacctggatgccattgaggtcatgagaaaccactggtgctcttaccttgggcaggatatcgcagaaaatctgcagctgtgcttaggggagtttctacccaga

SEQ ID NO: 4017 - DNA, 410 bp, Bos taurus
  Clone ID: 54-LIB3058-017-Q1-K1-F10
acgcgtacgggataaagtgtcatcttcattcaatgtcaatagaaattacttgaactaaaaagtggaataagtttacttatttagcaatgctcttagaatctgtagatgtgattgaattgcatgcttattggaaggaaagttgaatttgctggtatcttactacggcttgtcttaactgtgcactacttatttggtatggatttgatcgcaaaaggcactactgcacactgtggacaccaattcagaagtgcacagacctgtataaaaatttaaaggcagtgcaaactcattatctttaatatacatttgtgtgtaaaagctttacagctttgtaaattttaatctaattctgaatttagctgtaatttttaaaggggcatgcttacctcaacaaaccccaagctgatgcc

SEQ ID NO: 4018 - DNA, 463 bp, Bos taurus
  Clone ID: 54-LIB3058-022-Q1-K1-F10
gggaaaaaggagccgcgttcccgttggaaatctgttagaaacggaggatcttgttgccatttgggcctccacaagctactctctgtccagaactcctgggtcttccaagagaattctgagggtactagggattcgctaaagaaccaaaagcattgagaatctggctgaaggctggcatagcttttacatcagaaagagcacattatgcccttacagagttatagcaagaaaaccagtctggttggaaatcacaagaatggctgatgtctttttcatggagtgtgtgacataaacttagcaatttaactaaatacaaatatatgcatgatgtaatccagtcagaattcaaaaaacaaaaggtatgcttgctttgaaatgattttaggccttgtacacacttgaatcagtcgagcatgtaatgactaataaataatgcagatccaatgtgattatgaaaatgact

SEQ ID NO: 4019 - DNA, 197 bp, Bos taurus
  Clone ID: 54-LIB3058-022-Q1-K1-F6
tttccttattcccggtcgacccactctccgcacaacttgaccacgcttgaaatgactattttccctaagtatatttctataacctttggaaaggattgatgtttatagctactggaagtcaagattggaagtccaaaaacataattactgcctttcttttataataaattcacatatgccatttatgtccacaatgt

SEQ ID NO: 4020 - DNA, 422 bp, Bos taurus
  Clone ID: 54-LIB3058-024-Q1-K1-F6
gtgacttgttgtcctaactttgtgagcaccttagttttgcctaaaaattgtagaagctcaatcctgctgattgtctacaaacattttctcttacatcacttatcacatcaactacctacactgaacctgggctcagagaatccgagatgtgaatgtgcaggatctgcaggtgtagcccatgaaagatgtactaactgcacaggagggaagatgctgagatttcctgagaatccaaggccttagtaaaaaactggcataagctgaatgcggccaagactctggagctacaccaaactgtgtactgacagccatgggagatgctgtctgccacatctggtttgcatggcaacgcagcggcaccatcatgatatcagtcattccggattggaagcttgtttccaacgatgcgatcacctaagcaa

SEQ ID NO: 4021 - DNA, 256 bp, Bos taurus
  unsure (196): Clone ID: 54-LIB3058-027-Q1-K1-F6
cttaaaagctcttcattttctttggccagaaagtgtatggtttgtgttttctcggttgttttccccccctctaagggatggacatttagtctctgggtggcgtccactctccgaccccagcaggtgtggtgatggcctgctgtctcttctctctgtcccactttctgcctgtctgggtgccctccccttgcacctnctcccacaacactacctgaccacgaacaactcatgccaagtagagccagttttcaatgct

SEQ ID NO: 4022 - DNA, 452 bp, Bos taurus
  Clone ID: 54-LIB3058-029-Q1-K1-F6
aaagctactatatatttgattatatagcacttactgtgtgccactcattgttctaggggctttagaaatattcattgataatagtcctaagcccgcttatcagtcccatgaagtaggatttactgttggggaaattgaggcacagaccagtaaagttccattagtctaaggatgaaaagagtgatttgagtcagagaaaaaaaaatgtagtggtgtttatacaggaaaagttagagaacttggacaacttgttaagtggaaaaccaaaaaccgtactgccctggagggagagaagggaggctatgagaggtgcacattgttccaaaaagaaatttttcaagtatttcccctctctaattctgtacttagcaagcaaatgacattgatttgctttcctagaaacaacttgatatgagaagtgatgagtttcctagaatcctcataaattaaac

SEQ ID NO: 4023 - DNA, 51 bp, Bos taurus
  Clone ID: 54-LIB3058-031-Q1-K1-F6
cggacgcgtgggcgcgagcggccgccctttttttttttttttttttttttt

SEQ ID NO: 4024 - DNA, 277 bp, Bos taurus
  Clone ID: 54-LIB3058-032-Q1-K1-F10
cgaagattcagctgtgactacgtttgtggccctgaaagctcgggtcagggaacttgaacggcagctatctcgtggggaccgttacaaatgcctcatctgcatggactcatactcgatgcccctgacatccatccagtgttggcatgtgcactgtgaggagtgctggctacggaccctgggcgccaagaagctctgcccccagtgcaacaccatcacagcgcctggagacctgctgagaatctacttgtgagccggccaccccaagcaggccttgcct

SEQ ID NO: 4025 - DNA, 148 bp, Bos taurus
  Clone ID: 54-LIB3058-032-Q1-K1-F6
aaggatttggttataaaggttcctgctttcacagaataattccggtgatttatgggcggggttttttactatactggccgttctacctctgttttcaattctatttatgtctttatatttattttttatttttttttttttttttttt

SEQ ID NO: 4026 - DNA, 451 bp, Bos taurus
  Clone ID: 54-LIB3058-035-Q1-K1-F6
acgctctggtggctaaggcgctcagatgacttttgttttacgattcggcattttgagaacagatttgccgtggaaactttaatttgcccttgaacagtcaagaaaaacataatggagagaaatttaataccacagcataaccccaccctttgtattttgtgcagtgattattttttaaaaaatcttctttcatgtaagtagaacatagggcttcacgattttttcatctcattaactcaattaaaaccattatctttaaaaatctttttttttttccaagtgtggtgtcttttctcttgaattagttatatgaagtcataggtaatagtacacttcatcatagagcttacgtattaggaaatgtttaaatttcattaatccatgtatccagatttttttgttttaattatgcattttcaagaagagaggttctctaataatcacatatatg

SEQ ID NO: 4027 - DNA, 260 bp, Bos taurus
  Clone ID: 54-LIB3058-037-Q1-K1-F6
cgagatcgcgagcggccgccctattctaatttttttttttcaaaaagcactgaaccgtattggcttatttattattaaacaaacaaaacacatgcagaactttgaagtgtggacactggatcctcaatatgtaagaaactgggaatttcctgacggtccagtcgtcaggacttggcgctttcactgcagcatttcctagttccccttttccctcaagattacatttgtccatcgtaattaattctatttaatatttataa

SEQ ID NO: 4028 - DNA, 440 bp, Bos taurus
  Clone ID: 54-LIB3058-040-Q1-K1-F6
cgaccctcgcgtgcgggcaatctttccatgtcagtattgagatatctaccatagggtgacagaatttgtaaagacaaaattctccaggtcgtctacggtaattaaggtggtaaaaacaagagttctttatctgcttgagtcttacgcttctcacgttcagacaagtcatcacagcactgtcaacagaccagaccgttatccagcagcgacaccaaggacccttacgtgtgccaaccccgggcctgggagccgccgggcttcaccccctcacacctactttgctctgcgcgcctgcagctccaggcccccggacctggcgctgggacgaggcccagcagagaagggtgcgaggctgggaaggcgctctctgaggcagcgttcacgcctgtctctttagagcccactgacgaccatacgctactgaaaatggcgcaacttac

SEQ ID NO: 4029 - DNA, 445 bp, Bos taurus
  Clone ID: 54-LIB3058-043-Q1-K1-F6
attttctacagcccttgagcctccatttcttcatctgtaaagggaaggtaatgcctactgtagggttgtttcgaggattcagtgacagcattccgcataaagcatgtgctccagcgtgctgaatgatactgccagcagtgcaggcactgtctgttagtgagactgatgtttttgtgtcctttatttcctgagaaaaatcctcctcatgggcactgaaagatgaaaagctttcctaggaagctttgaactgccaagtactttttaattagagagtggaagtcagaagcactttgagaacttctgagaaaatatatgtatttaatgagttacgtgtacattttttgtctctgtttcatcccccccccttttttttttttactgttctttctagctctcttcaccttttgctgcttagcagttgtgctttgagaaataatgatgcatg

SEQ ID NO: 4030 - DNA, 112 bp, Bos taurus
  Clone ID: 54-LIB3058-044-Q1-K1-F10
ggtgatggacaggaaggcctggcgtgctttagtccatggggtcacaaagagtcaaacacaactgagtgactgaactgaggccaatgatttattctagaaaataatgtttaat

SEQ ID NO: 4031 - DNA, 428 bp, Bos taurus
  Clone ID: 54-LIB3058-045-Q1-K1-F6
ctggggttcttcttccttgcttctctctctgatggtcaccaggaggaggcagtctagggctcgggggagcttggaccttcttctaatgctgtggagctctgggaagggttatcctgaaaggagagggcttccaagagaggagaagaccccggccagggggcttgtgaggagacagaccctgggttggctcctgacatccaaagggaacagtctggaatcagcctcaccctggcccaggaacagtctggaatcagcctcaccctggcccagtctcagactcttgctcttggccacccccatccctgggaagcagaggcgggcagggtaggctacatacaggtacagcttccccatcacagggctgtgggctcactcacatgccctccctttctccagtcccccactgaggggccggcctcagtgcttgc

SEQ ID NO: 4032 - DNA, 201 bp, Bos taurus
  unsure (29): Clone ID: 54-LIB3058-047-Q1-K1-F6
gcggtgcccatatagggccttttgggtcnctcgagagaatattttgggtttattttgggttgccttgagctgacatcatgaagcatgcctcatggtgccctgttttgggtttggaaaaaagctctgaaaagctataaatcttaaggtattttactttttttcctcttcccttttctgaaagcacaacttttctggtttctt

SEQ ID NO: 4033 - DNA, 271 bp, Bos taurus
  Clone ID: 54-LIB3058-050-Q1-K1-F6
ggaggtgatgaagatggtgcccagggagacacaggaaatgggggccggagctctgaaccaccccccatggagtgccggtttcagagtgaggaccggaactcctgcccacagatcatagagaacctcaacttccgaagggcggcaggtgccagccagccagacccaaaccgctttggccgagaccggctcttcagcgctgtggcccggggggcccccgaggatctggcggggctaccagagtacctgcgccggaccagcaagtacctcacag

SEQ ID NO: 4034 - DNA, 421 bp, Bos taurus
  Clone ID: 54-LIB3058-052-Q1-K1-F6
cggacgcgtgggcacattttcactgtcaacttgtatctacaaatgccatcagattttattataaaaaccattgtatcagtcatggtatgctaggttttgctgccttaataaacaaatccaaatctcagtggcttaacaccacaaaagatgctacacattcaataagaggcagtgagtgctctgctcatcagagacttctggaacctatgctaaccaaggcgacatctgaactgtagcttccacaatcatggcaccagtgggaagggaaaatgattggttcactgagacttgaaacatctgctaacttttcttcctctctctcttccttcctcccttcttcattttaaaggaatagtcatatgccattggccaaaagcaagtcacacagccacatttaagttcaaggggacagtgaaatgaa

SEQ ID NO: 4035 - DNA, 285 bp, Bos taurus
  Clone ID: 54-LIB3058-053-Q1-K1-F6
gtcagaacccccagcccatcgttctgttctgaagtcctatcactgccgcccccttcctgcccgacccatcatccagttaccaccagggaacctgcacgatttagggcatcaccttcttatgccaagggccagtcggagttttctgggcacctccctgcctcactactttgcccttcaccagccgggatgagacgccaggtggggcttcttaatatccaacatgtgaggggcctttgtgggctgccctgctgtttctgcccactattacaacacgactgattacgt

SEQ ID NO: 4036 - DNA, 275 bp, Bos taurus
  Clone ID: 54-LIB3058-056-Q1-K1-F6
tcgcgcgagcggccgcccttttttttttgttttttttttttttttttgttatgtagtttgtgtgtgtagtattgtttttggttttttttaagaagggtttagagtatgctagggcaggattgctaggggtttttggttgggtaggatggatggacgagattttattggataaattgattgcacaacttatgaagtgactgatggttctatggaattgttttaccgggttgggctaaaggagggaagattaactaagtgttcctgggaagtgaaaa

SEQ ID NO: 4037 - DNA, 447 bp, Bos taurus
  unsure (389): Clone ID: 54-LIB3058-057-Q1-K1-F6
gcaccgagtggcttttgctcgggcggaggctgcagggcggacgctcgggccggcgcagccatggtgaagataagcttccagccggcggtggccggcatcaagggcgacaaggccgacaaggcttcggcctcggcctcggcctcggccccagcgcccaccccggccgctgagatcctgctgacgccggctcgggaagagcggcccccctaccaacgctacaagaaggggggctccgtgggcggcgtgtgctacttgtcgatgggcatggtcgtgctgctcatgggcctggtgttcgcctctgtctacatctacagatacttcttcctggctcagctggcccgagacaacttcttccactgtggcgtcctctacgaagactccctgtcctnccaggcccacactcgcatggagctggaggaagacgtgaagatctacctcgaggagaac

SEQ ID NO: 4038 - DNA, 407 bp, Bos taurus
  Clone ID: 55-LIB3058-001-Q1-K1-F4
tccgactcttagggtgtctgcaggtatactattgcctcaactgtactcgaagatggcatgctgtataatttaatttagcctgtggtccaggcaggtgtttgcattctaatttaccattgataaagacacaggaaagccacttttttttaaaattattttttaaaatgagtaatgaattatgtgggaaaatgagatttataaatactagttttcctttgagataatgtaaatcaaactttcataagttaagggtgatgcataatatcataacttgtacactgtgtttgtaagggttccctaaagtattaacattcaggtaatttgtgtaaattgcaaaagcagaaactgtgatgttcggttagtagtatgttgtgttagaagtcttttggggatgtatgttatataca

SEQ ID NO: 4039 - DNA, 424 bp, Bos taurus
  unsure (398): Clone ID: 55-LIB3058-002-Q1-K1-F12
cttcttcaaatgagaagaaggcaaagttaaccgtgatcttgtggtgtctcacttgggagtctctggggtggcaatgccagaaagttcatgaatgatggacaatggataatttgtagggaaaaatagggagcatgtaagaaaataaattttcttcttacaacttttctgctaatttaattttaaatgttacattaaaaatagaaacacatttcaacggttatgcctcagaaaaggaatgtgtcttcaattcctgtctaattcccataggaagaatctgtttctctcaagacaagcatcttctctccttttgatgcaaatgagttttggattttagtatttcctgcagatcaagataagaatgaataaatactgatccctcactgaaatgttactcattntactataaaatttttaaaatgtttct

SEQ ID NO: 4040 - DNA, 383 bp, Bos taurus
  Clone ID: 55-LIB3058-003-Q1-K1-F4
gctaactacaacgtccccatcttaccctttcacatatgcgcctcacagagactctctagagtatgggtctataatgacatggaccagactctgccgaggctcattaagcgttcttcacttcatgcgccaatgtgcttataggcgacaattctgggatctttatcctgccttaggacaccttagccataaacttcatcacttgggcggccctggatcccagtacacgaatgactgatgcgagaaagcataccaagtctgctcaaccggctccaggttcagccccaccgagtcaacacatccccaccccatccctgctcttctgatacggcatacccgaagacgcgtggaggatacactaactgacctgttctacccttgtgttc

SEQ ID NO: 4041 - DNA, 460 bp, Bos taurus
  Clone ID: 55-LIB3058-005-Q1-K1-F4
acgccacgcgtgcgcacccggtccaagacagcctttctgggtcagaacgactcctttgatttcagccagccggcatgtgtcattggcatggacttaccacgccccaagagacctgccccggctccaagaggctgccacagatggccccagcgttgcctacaggggcacccaggcagtctctgccggtgagggggcggccacccggcccaagacgaccaagttcgggaaggctctcgccaagactcgctgggtggagcctcagaatgttgtggcagcagctgccgcctaggccaagatggccacgagcatccctgatcctgagagtgcagctgccacttcttaacagagtgcggagccctgtgccagattggtaagcaagaggacaaagaagtccaagcacctggatgacgaatatgagagcggttaggaggagagagtgcctcctgctgttccaccaacc

SEQ ID NO: 4042 - DNA, 187 bp, Bos taurus
  Clone ID: 55-LIB3058-006-Q1-K1-F12
attttggttcactgggatgaacatctatatttagtgactgcaactttataccactgattcaaattccatccatgatgaagttatacaaataatgcatatattgatatcttttattgcaaaatgtaaatttaaaacttgtataatgttctgtgctttttgaaataaaatatcttatatgtgtatattt

SEQ ID NO: 4043 - DNA, 408 bp, Bos taurus
  Clone ID: 55-LIB3058-009-Q1-K1-F12
gtcttttggaaaataggtatgaataggcttgttttgttctgtgtgtgtgaaagtcttggttagacacagatcctcgggctcagcctggccgggaagttagagcttagccactaccagcgacaggaggaggttgcgagaatgtcacagcttttttcttcatgtttatcactatcaggtccatcatcggcgtggttttgtcttttgtcaagcacacctgtaaattaaacagcaaaagaggtaagaggaaaagagcaaagcttagtaggtatcaacacagttcagtgacgtttgtattctgagatttttctcatctattaaagccttagttctttgttacctttttcacaactctgtactgttgcctcatattctgtttgtgttttcaaaatgtgatgttggggaaaccaa

SEQ ID NO: 4044 - DNA, 216 bp, Bos taurus
  Clone ID: 55-LIB3058-009-Q1-K1-F4
actcgttcgctcacggaagacatatgtgtattttctataatttcagagattaccattctctgagatggctacaagctatatgtactacattcttaaaaaacaccaatggcgcttcgaggatgtacttggacttgaagccgataacaatattgtgatagtttctggtgcccattagagcaattcagccatacatatcacatgtatccattcccccac

SEQ ID NO: 4045 - DNA, 428 bp, Bos taurus
  Clone ID: 55-LIB3058-010-Q1-K1-F4
gatgcttttaaatgttctgtgaataaggtccttagcttttgtttcacctgaagcatatgtagaacacagataaataattgaattgtatcgtagatattatgcaattgatattttaaatgcaagcagtaaagattgatctataatgatgtgttgcagggaaaatttatagatatgtacaacatggtgactttttgtcctttaacaatggatttcttatttctatttatggagaaactgcagttactgcttttaatgtcttttttaaggtagctatttacaaactagaaaatattctgcatttaaaatagaacctgactgtctgggaagtctaattactattgttcctatttgagccagttgtctttcattaaaggtatagaatctctcaacagagacataaattgaaacactgcttctgaactgtcata

SEQ ID NO: 4046 - DNA, 429 bp, Bos taurus
  Clone ID: 55-LIB3058-011-Q1-K1-F4
tcggcacctgttaccagccaatactgaaaaggacagactcatggaatttagagtctagtggggaattcagaccctggtgatgaatgttgggaaagaggaagctatgaggtgactgcattgcaatcctgggggcctaactgggcccaagactgggcaagagtcctgcagaagactttgaaaaacctcaagtgggaaggtctgggggctgttggaggctggagccagtatgagctccccatggctcctctgacccgtaatcaaggacccaaggagctgacttgacgacagtttttgaggaagtggagcaggtagggggtggggaaatggccaggttggattaatccactggtcttgaccagttcaggaacaagattattcagccatgactggctgatcttcaatctaaggaagtacttcaaatgcataagc

SEQ ID NO: 4047 - DNA, 363 bp, Bos taurus
  Clone ID: 55-LIB3058-013-Q1-K1-F12
cggacgcgtggggagcaaggagagcgagggtacatgggcctgcccggcgctagtggctgggacggccaagcacaaatgcctgaagtaagtaccaacaaggccacggatccgtgtccctgagtgggcacgccagacggcgccaggcttgaggggcacgtgaggagctagaggagcgatgccaggggaagtcctgctcgaagtggctgctgtgtgagagggagtgccaggagccgagaggaagcatgcgagactcacatgggctgaagctcagatcaccatcctgccgtagagtggaagtcatgcaagtactatcctgaggcaactgtaaagatagagtgccctgactttctaacgtatggaggt

SEQ ID NO: 4048 - DNA, 437 bp, Bos taurus
  unsure (427): Clone ID: 55-LIB3058-014-Q1-K1-F4
tcggaaaatgatgcaccccaaaaaatccaaatgagaaacataattgcttcaaaacatttatatagttggaaagttatatttaagtgaaaatttgaactgtcatgtacaaataaaaactaagatgcatgcttagtgctctgcacggcagcctgtgattgaaaatgatgggatagatttatgtatcaagtactgacactcctgttgtacccactggaattgtattagctgcttatgttatgtgcttccatgataacctgcttattcagatcgaagtatttcagtatgaaagagcatcatagataatgaaagtcactcactcatattgtttactttaaaatatttataaatatggcttaaagaaatgtcagtgataacaattacataccgtatttacttgcataatttccttcgtatttgtgcagatatnttgccctggg

SEQ ID NO: 4049 - DNA, 247 bp, Bos taurus
  Clone ID: 55-LIB3058-015-Q1-K1-F12
cccttggaagggcccaattcttgggcccagggaagaaagcaggccattggcccaagagaaaaccatccctttttgcagtcccaaagattttacttaaaccaagatgaacctttctcctattgaagaaaagtgcatgttaaacttctcctttttgggaaaaggaagcatggaaattagcagcagatttaagagtgggtcatttaccaaccaatgcttaactgaaatttggccgctaaaagattaatca

SEQ ID NO: 4050 - DNA, 370 bp, Bos taurus
  Clone ID: 55-LIB3058-015-Q1-K1-F4
gaaaatgcagtcctctgtttagatcagcagtacttaaattgaacattaaatgaaaggcttactttctaatccttgggtggtttttcctttaaaaaaaaaaaactgaaagttttcttcatttcagaagttattttggacagacctaatatttcattcctccatctctctgtgctcttctgtaactttccttcttcctttttgtctgagcggtgtgaattgaggtagccaaggcttctctctagcgctgcgtctaccacagtgtaattgattgtaatttcacatgaatcggagatctcttttcatgtctatttacagtctactcgtgccaaactctgactcgtgcgctgacaaagcgtgcaggtgtgccgtg

SEQ ID NO: 4051 - DNA, 400 bp, Bos taurus
  Clone ID: 55-LIB3058-016-Q1-K1-F4
taagaataaaagttagaattaacaattttattttgtacaacagtggaattttctgtcatggataaatgtgcttgagtccctataatctatagacatgtgatagcaaaagaaaaaagccaggaaaacattcattttcgccttgaatatgtaaatgggattaatttgtgcctgtgccttatgtggaaaggaacttctttgggttttccctttttttggtggtttgttttggtggaagcatgtgcaggagacatatcatcgaaacataaagcattaaaatggttgggggttgcttggctggaaatttcaaaataggtaattgaggaccaagggttattccgaaatgatcgctttgggttgctgaatctcattttaaggggccctgatatttaaaactatttct

SEQ ID NO: 4052 - DNA, 430 bp, Bos taurus
  Clone ID: 55-LIB3058-018-Q1-K1-F12
ggctaacagtgtcatcttcattcaatgtcaatggaaattacttgaactaaaaagtggggtaagtttactttctcagcaatgctcttagaatctgtaccatgtgattgaatcgctgactcattggaagcatggcatcatctgctgacatctcattctgccttttcttaactgtgcactacttttttggcaaggatttgatggaaaaaggcactactgcacacggtggacaccaattcagaagtgcagagacatgtataaaaatataaaggcagagcaaactcattatctttaatatacatttgtgtgtaaaagctttacagctttgtaaattttaatttaattctgaatttagctctaatatttaaaggggcatacttacctgaacagaccccaggctgatgcctcgtgagttctacacaggctacacttt

SEQ ID NO: 4053 - DNA, 237 bp, Bos taurus
  Clone ID: 55-LIB3058-021-Q1-K1-F12
atagctgagcgagcagaatgagcatcactatattttgcaaaggcagaaatcatggttccaggggatgaggtaacgctctatacgagctgaaatgtactgagcatacattcaaacaataccagtacaaccatatcattcaagagtggcatgtgtgatacagtatcatgtgatcagttatcaagcccatttctaagcctcactaaatgagctaaatactgactatgataatactagcag

SEQ ID NO: 4054 - DNA, 257 bp, Bos taurus
  Clone ID: 55-LIB3058-023-Q1-K1-F4
gttgagatgtgttgaggaatagtatgtctggagttaggatcttaggttttgaaattggtgagcctaaaggtgacagaaattcaaaatcagaccttgggtcctcactcatacacagagtcctcaaaaatcaaggctccttaaagaagtgcttacaatgccttggcttgtcttactagactctgcctaatgcttttgaagatggctgtttacagctctgactgcatagccctgttttctgtaaaataatatattgatta

SEQ ID NO: 4055 - DNA, 294 bp, Bos taurus
  Clone ID: 55-LIB3058-024-Q1-K1-F4
catatttgtacgattgcagatgagtctatgcccataagatggacactattttaaggtgatctttaatgtttttatataaaaaaatttggaatacagtttgtttttacttatcaagtcccataagtcttgtatttgtttctcatgagtgtaaccctggaccatgactttgatatctttgcttttttgtctttgggtggcctaacctacattaacgtgaaggttgaacattttaaaacttttctcccgaaatcatgatgatgatttactttattaataaataaagtcctgtatttg

SEQ ID NO: 4056 - DNA, 335 bp, Bos taurus
  Clone ID: 55-LIB3058-025-Q1-K1-F4
gcggtagatcgcgagcggccggactcatgataattcagactctgagacaaatatttattcggcatagttcctcactgatactgcagtcacattaccggagaaaccataggccatgacccagttgccaaagcgtgtgctgaaaccactaaccaagagcccatctccttcgatgacaagttcatgtcatgatggatccaccatgtgtaggactgtccacaagacagtgaatcctatccgagaagttgcttcttccaaatcacagggcagcagtagaaactggacccagcagctgggaaccttgtccccacgcttgactgggcaggaaggagggaccc

SEQ ID NO: 4057 - DNA, 422 bp, Bos taurus
  Clone ID: 55-LIB3058-029-Q1-K1-F12
cttgggaagacaagaagatacatgatattactgccttgtttccagtccatggcagacatcactaatcaatcacagcactccctcctcctgagcggggcgcagcttcagtgtcctttttcatcatacattccaagcggagagtgagagtcagttggagtgagcatgggagatatctatttatctatttcccattcctcagaaattcttactcaaaacttactcaaacctccagccctgaatgtactccagatctctgctgtagggcaccttgttccttggggattcattctcacattcagtgtgaccgatttgaaatgaaatcatggtttctcttctccaagtagtcctcgctcccaaactcctttctcctgttaatagcatgccattttcctggtccccaggctaaaacattcacagttttc

SEQ ID NO: 4058 - DNA, 342 bp, Bos taurus
  Clone ID: 55-LIB3058-032-Q1-K1-F4
ggactacttcccaaggattgaagccatcacaagctcagggcagatgggttccttcatgcgcctcaagcagttcttggagaagtgtctgcagcacagggaggttcctgtccccaagggcttcctgactgcctccttctggcgttcctgatgtcactccagcacctgccattaccactttgttgctgaggggcaataataaagcgactgaagacagctgtacctgcgagaagtcatgtcagtgtgtgttttgtgtatttgtaccttgtgacgaagagaggagattttcttgggccatatatcttagaggttccttaatttatttggtttctccttaatattatt

SEQ ID NO: 4059 - DNA, 411 bp, Bos taurus
  Clone ID: 55-LIB3058-034-Q1-K1-F12
tcgatcgcgagcggccgcccttttttttattttttttttcagtttgtttatttttagaggctgagggatttttggttttattttgacttgagaaataaatacatttgcgttgaagacctttcactttcagttaagctggagtagaattaaaataggatgtccattatcaaacagcagtggggagaagcaggcattgaggaagcagggcagacccttcttaggggccctggggcacggtcggcctttcctgtccagccccagggggcccttccagcccacttttaggccaccgggttctgtcccagggcacccttcccgaggccagcagtgccctttccaggagcccccaggatgggaagtctgggggtgccagtgcagctggcccacgacagcctgtgtgtcagcgaccat

SEQ ID NO: 4060 - DNA, 436 bp, Bos taurus
  Clone ID: 55-LIB3058-034-Q1-K1-F4
caaagagtaggacgtgtactgaagtgacttagcttgcacacaccaccgaagtgatcttacctgcaaaatggagaccaaattctatcccatgaacctttaaggagtccacagtgttctctgggtaactttgcagtgcctgtggggtcttaggagtgcctggatttttaaaagctttcaattgtgggagagcctctttgtcacttatcctttatctcattcatccatccaatccataagtatttcttgggtgtctactatacaccagacacgtgcagagataagaactgagaagctttttcactctgaaaatcttggcaataatgccaagattggaaagagaatctctagaactccagagaatctcacaaagtgtattatcccccccggctccggacaccccgtgaggcatgtggagctcccctgaccggggatcaac

SEQ ID NO: 4061 - DNA, 213 bp, Bos taurus
  Clone ID: 55-LIB3058-035-Q1-K1-F12
agaaaataactctctgcagattcgaaatgagagaatcctgagttgatagctctaaaagcagatgctgtatttgcctcctttaacccatttttcaacctgtttgttttttttaaagcttcactaaaggttgatatgtaccattgtatggggcagttttaagtcagctaaagcaataaccttgtgcatgaacatttcccagatttccatgatgct

SEQ ID NO: 4062 - DNA, 371 bp, Bos taurus
  Clone ID: 55-LIB3058-036-Q1-K1-F12
acccacgcgtccgggggtgcccggtctacaggggcacccatgcgccattgctggcggaccaccgcacacagatccgggggagcagcacctacttgctgcacgtgcagagcatgctcgcacagctgtgtgccaaggccttcctctacaccttctgccatcacctgcacctgcccgcgcacggcggtgaggccccggagctggctgccagacgccaggccagcttcctgcagctgacactggggctagtgcatgaggacgtcaaggaggtgcggtacctggcggagctgctgcggctgcactacacgcaggagcggtgcgggaccagccagcctgccctcaggttcgactacgtgcccagctttctgtacaag

SEQ ID NO: 4063 - DNA, 241 bp, Bos taurus
  unsure (40),(82),(105),(204),(217): unsure at all n locations; Clone ID: 55-LIB3058-037-Q1-K1-F4
gggaggcacaacacagaggcagaggacacgaagcaacacnggacagaaaacaaagagacaacaacccaaaaacaccagacangagcacacacaagagaccagcanccagacgcaacaggaacgccacacacacgcccaacggggcccacccgcaggccgagggcaacaacaccaccggcgcagacaagcagaaccaaggcgacnacaagaccaccancagccgcaagggccagagagcaac

SEQ ID NO: 4064 - DNA, 67 bp, Bos taurus
  Clone ID: 55-LIB3058-038-Q1-K1-F4
cacgcgtcgcctgccacaggaccagcctcgctgcaccctcttgcagcagcgcccgcttgtacgcctc

SEQ ID NO: 4065 - DNA, 422 bp, Bos taurus
  unsure (12): Clone ID: 55-LIB3058-039-Q1-K1-F4
gcttgacatgangaacaaagcaaaggattttaataggttggagtggtcttgaaaccttggcaggagcctttaataggcccttgaaaagggccttgggaacagaatgtggtcaaaccaacacacctttttcaaggaagaaccgtgtcaacaaaactgaaaaccggacatcctggccttaaggggaacaacttctttggtggcataagggggtccttaaaatcaaccggggcaaaaaggaataaaaagggggtttccgcctaatgggcttccaaccttgaaaaaggattttcaatcattcaattcaggaaccctgaaaagttccccttggtgcaaagtttgaagtgtgtctgattcaaaaggggatggtctggatctatacaaacatgtaaaaagagttctcaagtctccaatgggctcatccc

SEQ ID NO: 4066 - DNA, 414 bp, Bos taurus
  unsure (54): Clone ID: 55-LIB3058-042-Q1-K1-F4
gcggtgggcaagacaactttctcatttggttatgatgcacggatggaccggatncggcgagttacacagcagctaatgaggggttgattctgtcaatgaaataaaaacaaggtgaacagagacaatactgaattgagtatgtattttgtaccagaggtgaccaactgtttccttacctgtgtcaggaacaccaagagcaacggtatcacgagacactggttaacaatacaccacaaaggtccagtgacaccctgggctatcaatgcaatcaccaacttataatttatttataaatatatagagaaacaatatagtagcaaaaatagtattatgatgaaataaacagagtgtaactttaaattcagtgggatagtaaaaaccttaacataccatacgtattttacaaagtgatct

SEQ ID NO: 4067 - DNA, 366 bp, Bos taurus
  Clone ID: 55-LIB3058-044-Q1-K1-F4
aggactcgtgggttttttttgacagtttgtgtcatttatagaaatagaagtgtcaaaggaccaaggcaataatgatttgtctgatatacactgtgacaggagattaaacatgcatctctaccaaatccctacctattacagtacactctatcaccaactttacaccttgattataaaagcaacagttggttcagagattctgaattaaaacggatgatgtgttgcaatctttgtcttaagctgttaaagagggctgtgtactgatagttctgaggtagactgcaactttcatcttaacatgcatacatgaaatttcaaatccttcttgctgctataaactcactctatggagcctgagcagatctc

SEQ ID NO: 4068 - DNA, 345 bp, Bos taurus
  Clone ID: 55-LIB3058-045-Q1-K1-F4
gtcaccattattattcattctagggctttttttaacttttaccttcttttaattctttttatctcttttaatggttatcctaaaaagatatgacttccaatataagataaaaccccattcaaaaaacttttgatgacacagaccctaatttgacttctgacatccacaaggaacagtcagtcaatcaacctcacccttgcccaagaacattcttgaatcatcctcaacctgccccagtctcaaactctatctattggccacccacataccttttaagcaaaagcaaacaccgtaggctacatacaggtacacctttcacatcacaagtcttttatcttactcaca

SEQ ID NO: 4069 - DNA, 401 bp, Bos taurus
  Clone ID: 55-LIB3058-046-Q1-K1-F4
gtctaatgatttttttatttttaaagttaatgtttaacccagatctggttatgtaagttcattgccctaaactgtgctgaccgtgtctaatcaagttataaatttccaacatcgatcatgtatttaccaccttcctggcattttctgaaaggtgtcaagctaaaatattagacttgcttaggaatacgttatcaacttatacactgtgctaaagctgtgcctttgaaattctttgtttaaaatgtgagatgatttttgtaggcaggttcaggaaagaaggaaaaaatccaccctttaataatcacttgcaactcaacacacagtcccgccacactgcctcttccagtaactttacttcagggcttatcaagtctgcaactgtgcccaaagtataggtttac

SEQ ID NO: 4070 - DNA, 369 bp, Bos taurus
  unsure (49): Clone ID: 55-LIB3058-048-Q1-K1-F4
agtgtttacaccggcggcccttgcggccttgttccttccgcgggacggngagaaagagagagcgcgaaagagagaggatgtctctctcagattggcacctggcggtgaagctggctgaccagccacttgcccccaaatctattcttcggttgccagagacagagcttggagaatactctctggggggatatagtatttcatttctgaagcagcttattgctggcaaactccaggagtctgttccagaccctgagctgattgatctgatatactgtggccggaagctaaaagatgatcagacccttgacttttatggcattcaacctggatccacagtccatgtcctgcgcaagtcctggcctgagcctg

SEQ ID NO: 4071 - DNA, 396 bp, Bos taurus
  Clone ID: 55-LIB3058-051-Q1-K1-F12
ccgacgcgtgggggagctgggaatttttgataactgttaaggacatcaactatatttttaaactgaagtgcagttgatttacattcctgtatttgttttggggtgtacaacacagtgattcaatatttttatgaaataaactctatttaaaggtatcacacacacaaaaaaagatgaaaatacacagattcaacaattctcacaaatcctaggaagagaaaaaataaatgtgcatatgggcacattacagcgaaacttcaggacatgaacaacacagagaaatctgaagagggtacatttaccagaaggtaaaatatatgttacatttaaagaacaacagaaagttgagtttttcagaagaaatcatagaaacccagaatcagatcttcagggtgc

SEQ ID NO: 4072 - DNA, 305 bp, Bos taurus
  Clone ID: 55-LIB3058-051-Q1-K1-F4
cggacgcgtgggcggacgcgtgggctatatcgcgagcggccgccctttttttttttttgtttttctcttttctttttgtgtgtgtttatttaagttatttttcttcctccccttttcttttccgtctccctccctcttctgccatgtaactggagggtgcgatgagttgcaaacagctggactgtcaggctgcttctcttgcagatgtcctcctctgccttccctcttccccctttgcccttcccttttctttcttcattcttttccttggagcactgagcaccacttggaagcttgagagaaac

SEQ ID NO: 4073 - DNA, 436 bp, Bos taurus
  Clone ID: 55-LIB3058-052-Q1-K1-F12
ttttattttgcccttcctttggtagtgagtacaaaatatctaatatcaaccatggtagattctatatttttcaggaaccaagtatatatgtgtaattttaaagaaaacatggtagttaactgtaagtcaagtgtaagtgcaagtcaattgtactgagtacatttatgtattcacacagaatgtaaatacaaataagaaaggtcaatggcaatgtggcaatgatgtaaccattatttaaatagaatttgttgatgtcattcaggttttctaatcttttttatgagatgggtagggataaaattataataaatatgtttgtagaaaagtagacagggacacacataataaatgatgcttgcaagtccgaatttttagcagcaaacatgcaattctaatcaactaatggaggctgcttagagccaaagaaaacaatttc

SEQ ID NO: 4074 - DNA, 251 bp, Bos taurus
  Clone ID: 55-LIB3058-052-Q1-K1-F4
atcgcgagcggccgccctttttttttttttctaattcatgttcctttattcgcgttcagtttctgcccgggtcgtgggaaggggagccaaggtggaagtgacaggccagcactgggctccacacttgctgccctgctgctttcagcgtgccccccaggagccacttctggcagtcagatagatctgcgagttggggaagccgggacagaggaaccagggtgcagaccgcaccctttctacgaaaacgtaaa

SEQ ID NO: 4075 - DNA, 393 bp, Bos taurus
  Clone ID: 55-LIB3058-054-Q1-K1-F4
tcgatcgcgagcggccgccctttttttttttttttttttggtgagccagatagacatttgattttaatgacaaagttggagaaaataaattggcaaaaaaaaaaataataataataattaacagaaaatacgttttttacagatatgtatagaaattatgattgatttgtctggtttcttaaggaaaaaaggaacggaggtaaattttttagcttccatgaacatttactctaagatgctgactgcatctcttagtgtaggttccagatgagatccaactagtcctgggtcacctgggcacctgatttctagaagccaataggattcattcacaagtagctctgaacgtgctttctcagctgtgaacactggattccgtgtggtcctggagcg

SEQ ID NO: 4076 - DNA, 352 bp, Bos taurus
  unsure (335): Clone ID: 56-LIB3058-003-Q1-K1-F12
ctttcatatagtgacccataaaataggtactatagaaacactccattattttggcataggcacatctataatgccaacctgatcattacggaacgccaatacagctccaccaaatatatacacgcctggcaggatacatcatatgtgatggttgcctgcgtaagggcagggctgtacatggatgcggcacacaaatgcgaggcgtcttgttcttctaggatcaggatggcgaggatagcagtcgctggatgactttgtcgggatcgttgtcgtggatggctagcagctcggggacgtttggcgatgtgaagcccatctcgtggaggatgctgtangatttcacgaactcttt

SEQ ID NO: 4077 - DNA, 433 bp, Bos taurus
  Clone ID: 56-LIB3058-003-Q1-K1-F8
gtcacagccacggtcatggccaggcacataggcgcctcccagagggcctgaaggtcggtttctggggaaaggcatggaccaggggctgcggtggttggttttgtgtgcttgacttcttgcaccaaggtgcggagagtggcccactggtggggctcgcacctgcccagcacacctgagccctaaacctgagcacttgggcggccctggatccctgcagaggaatgaatgatgggagaaagcaaaccagctctgcccagccgggtcccggtccagccccaccgtggcagcccacccccaccccacccctgcactcctgataggcggggcccggtgtggggtgggggtacacttactggcctgttctaccctggtgtcttcaccggaagggccctctatagtgccatgtgtccacgtgtggtgtttgtaccctaac

SEQ ID NO: 4078 - DNA, 449 bp, Bos taurus
  Clone ID: 56-LIB3058-004-Q1-K1-F8
attaatattaagacctattctttttccaatttcaggctcctcagcagatcactctacttttagggattaatggtccgtatcattccacctttttcatcagtttagattcatcttagtatttttagctgcttggcctttgctgctaaactacagggtgcattagagcatgaccttggatatggggctgttttcagaaacaaaactcaggattcatccgtggcttgtaagaggaaccccagggactgtgaagtggagaaataagtaaattaacaaagagtgatgaagaaataccctaaaactccaaatcttcttattgatgcttatgtgccctgcagtccctgtcgggcctgctacatagaagatatattaaaaatagttttaagtatgtacaaacactgctacatttaaaatggagaaaaacaaggacctgctggagagcacaggggact

SEQ ID NO: 4079 - DNA, 441 bp, Bos taurus
  Clone ID: 56-LIB3058-005-Q1-K1-F12
gctgaaataaggcagaaaatacctttcatacatgtacttgaccttcaagtgcttaatgtaggtaaatacatgtaatcatacatgatgctaatatggatgattgtcctacagaagaggtatccagcttaacattaaaaatctctttatctctactttcaacctcccaaatgtctgtttctcttttctgttatagttaattgcattcctatccaacctaattatacaaatgaagaatctagcactatttaccagtcttctctgacatttttcatcaagtcctgctgagcctgtctttttaaaccatctctggtattttctccttttctccagtccctttgttgacttttcattacctggccctgtgttctcaagctgctcttcagccccctacacaccttgttccatagataacagcacaaaaagactactgtgttctttaat

SEQ ID NO: 4080 - DNA, 448 bp, Bos taurus
  Clone ID: 56-LIB3058-005-Q1-K1-F8
attaatctgctcgttaaattttggtagtactcaactaaaaacaagaactcgtggtttccttgttgctagatttttatctaattttttcaagctgtttaaaatgatctgaactcctatttctttttaaactggacttctttcagttttcttatatttttctaggagtatattcatagttacctgtttttcaggttaaaattagcataaaattattcattttgcttgaaatccctgctatctttttttcattatgaatatgttaattgggctatatttttcatttttttcttgaccaacctgccagacagtgtatgttttattattattttaaaagaaaaatacttttgactctgtgactgtctttaattttgcattttatttttgtttttatctgttaacagatctttccttctacttactgtgtgttcattctgcaagttgctcttta

SEQ ID NO: 4081 - DNA, 313 bp, Bos taurus
  Clone ID: 56-LIB3058-007-Q1-K1-F8
tccggttgacggatgcactccacgcgtacatgcgagcggtcgcccttttttatgtttatcgttacagtcgctctctattgggtgcaggttcaagcgaccaattagtctatgattcacaagtttgtgtccttaaagcataagagaaaaaggatagatacgctgaatgcttaatttgaatttctctgggagtgattcttaatatttgtaacttgattctttttgaattggtggctacaaaagcataaaggtcatagaattccctggcttcaccaacagctggaatcagatcctggttgcacagacagatcaagaa

SEQ ID NO: 4082 - DNA, 366 bp, Bos taurus
  Clone ID: 56-LIB3058-008-Q1-K1-F12
gttcccaaccacatggctttcaaacgcttggttcaggcagattgctatcagctaattcatcaccaggcaaatggtcactgaccactttatttcacaacagatggtttttctgtgaaattgtttctgatcaaatctgtctggggccatgcggttatcgaccagcaggttcccagccagcgtgtcattgatcttagctgttacccacttgccgttgactgagccgttttcacgggcatggctgtgggccccgtgttctggtcttcctgacctctggcccctgacccctaacctgtctgccctttcaccccagtgcaacaccacctgtggcagaggcgtgaagaagaggctggtcctgtgcatggagct

SEQ ID NO: 4083 - DNA, 208 bp, Bos taurus
  Clone ID: 56-LIB3058-009-Q1-K1-F8
gtaacggaagatttttgtgtatttgctataatttcagagattaccattctctgaaatctctgcaagctatatgtactacattcttaaaaaaaaaaaaaaaaaaaaaaacacttttatattgtaatatagccgataacaatattgtgatagtttctggtgcccagtagagcaattcagccatacatatcacatgtatccattcccccac

SEQ ID NO: 4084 - DNA, 418 bp, Bos taurus
  Clone ID: 56-LIB3058-010-Q1-K1-F8
atttgttttgacctggcatacccattttgaattttcaaagcatagaagtggcaaaggaaatagagaaaagttttatttcctactcttaaatttttatatcttcagtatatgatgagaaacttaatagaagaataagcctaccagaaaattaagataaaaattaaacataataaataggtattttcttatagaagcaatgcattaaatgtttagattcacagaccagtccacagcaaattgttcccttcatagtgtaattaaaatactatcgttacttaaaagttccatttttctacctttgctgaccagacttgttcttgggcttgtgatgtaacaggttttctgggaaaacatatttcatggtgcatggtgagaaagaaagcaccctagaatccagtcttgactcaccctaatggga

SEQ ID NO: 4085 - DNA, 124 bp, Bos taurus
  Clone ID: 56-LIB3058-011-Q1-K1-F8
cggagcgtgggctgacgcgtgggtcgcgagcggccgcccttttttttttcagggagaaagttttcattaattaattatatctattttctaatgtattgttttattgcacatttataacattttt

SEQ ID NO: 4086 - DNA, 333 bp, Bos taurus
  Clone ID: 56-LIB3058-012-Q1-K1-F12
aataaaagaaatgctggtctttatcgcgttcagtcctctctatgcattacatttaggagacatttacacagactctaagaagtcaatcaggatggtgaacaggctcaaagctatgtagcataagaatggaataaggatatcttaacttcagcactgctgacattttggactggatgatcctatactgcgggagctctcctgtgtacttttttaatgcttgtcatctccaccgtcttctactctctagatataagtggacccgttacccagtcttgtatttgataatgaagatgctatggttgtgccgcttaaaagcttatcttagcatatgta

SEQ ID NO: 4087 - DNA, 417 bp, Bos taurus
  Clone ID: 56-LIB3058-015-Q1-K1-F8
atcgccatgctgttctcagtacttaaaaccgacagacttcgaggggccctctcgacctttgagctggctcctgagcctgtcccagcctggctgtgtatcccagccactgtcctctgtccacaggtggtcctgctggcctggcttgcctgcatcctcagcgggctctcctcccacttgggggtcggggctacgggggtccctgatggccacctgcctgggcctgagatcaccaggcagccaccgtggatgtccctgcagcccagggcagggcggagagggtccctggcactgtggctcatgccacaatgttgcgatgggattgctggaagctccctggtggtgtcaggtcgtgtgggaagcgacaccgtaccagtactgtgtgtgtaggtaactcagagagagacagccccacacaca

SEQ ID NO: 4088 - DNA, 435 bp, Bos taurus
  Clone ID: 56-LIB3058-016-Q1-K1-F8
gaatttaatggtttcacctcaacttcatattagtctcaaaatattttcaaggaaaaaaattttcatttccttttaaaatcacaataatgtgtcaatttttcatttataagccagttgcaaattgacccgacaatgctatcattcaggagaaagctttttctttctgttaatatgtcacttcacacatgaaagtcaagtgatattttaccagatgttttttcttcatattaaaggtttctgaatggccatctacagtcatccctgtaaccatcattaatgatttatactggttagtctgagtgcttttccagagcttcctacctgacaacttagttggcatctggggtcctgatggaccacctagacagaaaaggctttaaagacaactgatgcttgtggtaaatacttgtcatcacgcttgatgagtatttctct

SEQ ID NO: 4089 - DNA, 411 bp, Bos taurus
  Clone ID: 56-LIB3058-017-Q1-K1-F12
cggtacgcgtgggggtttttggttttatgaggtgctggtcataaaacttggtttcttggttgtttgtttctaattttatcaaagccagtcaggtgtttgcattctaatttaccattgataaagacacaggaaagccacttttttttaaaattattttttaaaatgagtaatgaattatgtgggaaaatgagatttataaatactagttctcctttgagataatgtaaatcaaactttcataagttaagggtgatgcataatatcataacttgtacactgtgtttgtaagggttccctaaagtattaacattcaggtaattagtgtaaattgcaaaagcagaaactgtgatgttcggttagcagtatgttgtgttagaagtcttttggggatctatgctatatacatagttg

SEQ ID NO: 4090 - DNA, 419 bp, Bos taurus
  Clone ID: 56-LIB3058-018-Q1-K1-F8
agcgaagattcttatttccccatctgaccccaagctgactgccccagaccctccctgccttgaatctcagactaccctgattaatctgggaaggggcagagccacagaaagaattatgcacccccctgctcccgtgcttgggggcgataatgctggcatccttacccccagatggcggcccttgggatctgatgcctccaggccaaggtcttgaggctgagccctcagccctgctctggtgggaagataatgaggtcccttgttaggagagagacagaacaagctagctccgaggtagccaagctgtggcatacagaccaggacaccaggtagcccaaggtggtgatggagaggagtctggggacggggtcatgggtggcgaacttatcatccagatccagtgtgagagggaagctttg

SEQ ID NO: 4091 - DNA, 351 bp, Bos taurus
  Clone ID: 56-LIB3058-022-Q1-K1-F8
gaatattttaagactgtctttccagactgagtttgttaaccagatgcatcatcagaagacctctgatgatcatcagaagaacctctggctgatgaagactcagattctagtctgtggttggatttctgagcatcccttcaaagcctcgattgcaccagggaatgtgggatggatagtgatcccctcctttcgttgagcagtgatgtgatgtccccattcttgccactctgccttctggggatgagtggttgcgagctcttctcctttttaaagaaagaagccttctaaccacagggggcgctcttgaatgattttctgctggacgctctaacgcatgactatttctatgac

SEQ ID NO: 4092 - DNA, 409 bp, Bos taurus
  Clone ID: 56-LIB3058-024-Q1-K1-F12
gcctggaggagtccccaccgcagtcgcggctctcggtctacccctctgagcagccagcctccagccccggctccggcgacctccctgccgtcacaggggcggcagggaccgcggggtgcccccctattcggatctggaggggcgcgtctccaccccgcccagcccctgcccctcctggcttcccggacggctggagcgactcccgggggaagctgttcccggacgctcggggccgtcgcccgggcatctcggctgccagcccgactgagcaccgggcatctgcgaagccagccagccctgcctggcactgggcatctgcgggcaccgattgtccccggcgccgcccagcttctcgtacgccctgcgccgcgggcttctgggcgcgcacctgtcccccggtcgctgggcc

SEQ ID NO: 4093 - DNA, 454 bp, Bos taurus
  Clone ID: 56-LIB3058-025-Q1-K1-F8
gccgctagatcgcgagcggccgccctttttttttttcttttttctcgagtcaaatatgttatttcgggcaaagttctctccgctgatacctgcgagccactatgacagggagaaacgcacaggtccatcacgccagtctgcccaaagctgtgtccagaaaacccaggaactcaagagcccccgctcctccgctgtcacagttcatgtcatgattggagccggcatgttggagggactgaccacacggacaagtgatagcgttctccgaagatgttcgcttctctccaaattcacagggtcagcagttagaaacatggacctcagcagcttgggaaaccttgtctcccacggcttcaactgggctaggagggaagggacccccagagggacaaggcttccgagggggctgcttgtccctgggtcgctgatttcctgggggacaagccagggggtt

SEQ ID NO: 4094 - DNA, 329 bp, Bos taurus
  Clone ID: 56-LIB3058-028-Q1-K1-F12
ggtcgacccacgctccggataaatgttgaatcttcacaatgcatttagattgcacaccatctggtgggcggagtattttgtggactgatctctctggagagagcaaggttttataaacattaactgcaattacaagatattaacttaacttgctttgtctaccttactaattcttattacgatcctgcttaatactctgccatgatcctctgttattctctggccactgattttgatttgtttaaacacatcatttcaacttttataccaaacatggttttctttatcacttataacaatatttgtcattaaaattaaaacaccctttt

SEQ ID NO: 4095 - DNA, 77 bp, Bos taurus
  Clone ID: 56-LIB3058-030-Q1-K1-F8
tcgcccgtctctagtgctgtcggtatgcaaggcagccgttctttaacaatatttactgtggtcacctcatatgagac

SEQ ID NO: 4096 - DNA, 315 bp, Bos taurus
  Clone ID: 56-LIB3058-037-Q1-K1-F8
gcattcagttgttgcctttcgcctattgcagctttcccaggtgaaagtggttgggataactctttcggataaaaagccaaaccttgtacgttgtaagaaattaatgctaggagggtatatctgtatgacagaaaaggaggatttgccaaaaaagaaaacatacaatgtcttatttctacttaatgaaacgtgtgtatgggggtaactatatcacgacataatataaaacttggatgatgacttgctgattctctgaaaaatagatatatgacgactgcaggactctaatattcatcaaacatgctgccataactt

SEQ ID NO: 4097 - DNA, 429 bp, Bos taurus
  Clone ID: 56-LIB3058-038-Q1-K1-F12
attgtatatttcctagctcttttcgttatttaagtagatgaaagggacatcaatcagaagatgattttctctgcacacccctttgcctactgcctggaaaacctgagaaggttgtgtaccatgtgactgtaagatagtgttatcttatccccttgagtctccttcagggcctggatcctttgaaatttcacctctggccaccgagccaccctgggggcatgcagatcactgctttatgatacattgcccttcttaaaggttcttctcctcctgaacaattagaggaggttgtcggctccctgatgtgaacgaagtagccatttgctcaaaacaggaggaagacagtcactcaggaaacttaattgtgagcagctcgtctggagagagcaggtcacaggccggtggagtcacacttggcatcttgctctc

SEQ ID NO: 4098 - DNA, 371 bp, Bos taurus
  Clone ID: 56-LIB3058-038-Q1-K1-F8
tcccgtgctcgacccactcgtctcgcggacgcgtggcacgcgcagcggccttcctatatacttttttttcttaactgtttgatgggtttgttcttttatccttgtttcacaccaacttttattatatatctttctattcaaattttatggcaaaaaaccccttatttaagaagcccaaaaaaacactaccattatcaatccctgttacaaaacggcaaagattataccccatgatatttcctcagggtacctggcgaatatccacacttaaatgcacctgacaccacaaaaaagaaccccaggtaatacatcaggacctcttatcccctattatacgaaacctataataacccattatggcagtaattcat

SEQ ID NO: 4099 - DNA, 365 bp, Bos taurus
  Clone ID: 56-LIB3058-039-Q1-K1-F8
gcatttctgacaacacacgttcatctatccttctatagtctatgctttgactcactcaattgaccagttaaaaatctcaagacattattatcatgcttatttgcaacatcagcagctctcaaacctgcccaaagcatttctgggggcctgttcctctccaggctgacactcagaactttccagaacctgtccacggtatcagtatggaggaccacacattagaaaatgaacagtagttatcaagatgcaaaacaggaaaaaagccacatgaaaaccgcaagtgcagatcaatcacacaattttattagagtcttttgaacaaatgtattcctctgtgaaaaactcttgcaaaaaaaacattgggg

SEQ ID NO: 4100 - DNA, 388 bp, Bos taurus
  Clone ID: 56-LIB3058-040-Q1-K1-F8
gcgcggacgcttggggcgagctggatggactaaggagagaggggtggcgactcgaggaggaggacaagctgactgaggctggaccggcagccgacgtcacctgggggctcagggacggagactcggggggcaggggacgccccgcagccggcgatggagctcctgcaggagcaggaggggctggcgtgaaggccggcagcccaggcctggggcttgcgaagctccaccggaggaggcccgaggaagtctggcgccggcggacagcgccgctttcctggcaggagctgcgctgctgcggcatccacacctccctgccctctgggcactcagctggaccatgctggcggctcaccaccttcttctctcgtctactgccccgcccgacacc

SEQ ID NO: 4101 - DNA, 430 bp, Bos taurus
  Clone ID: 56-LIB3058-042-Q1-K1-F12
acgcgtccggggaaacagtgcaacctgagtgtaactttagttccgactgcatgatcacccttccatgtcaatcccagttagaagtgaaacaattacttggctttaagagcacatttattgtacgtcatggtgtatggtgaatatgttattaaataatgtggtactttgctcattaggcataatgtctaaaatctaatacacataattccattagtggttgagggaagcaaataatggaatcatcagtttgtcacctgactgtaaggttgttctcttgaacttaacatttttagttttaggcaagggccagaaatgtggcagacatgatttttgttacacattcttgtattatatgtgactcagttgcagacaagatgtgtctgtagtcagagacccttgtggaactgaactggaagacgtcttgtagtgc

SEQ ID NO: 4102 - DNA, 429 bp, Bos taurus
  Clone ID: 56-LIB3058-044-Q1-K1-F12
ctcattttctcctctttttcttaaaaccaatacatggtaattcgccatggttaaatttcctgaaagaagctaagaaagcatacaagttctttacacacatgcaaatttatgtatatagatagatagatatagagatatagatattgatatatgtgtatttcaccaaaatatatcccagttgcacactgaaggcttgtattccctggaagctgccccctcaaggaaagcaaactggatactaaatagaagttgaggtcttaagatcttgaggtccatagatttaccaatctaatcttttctctcctgtactaatattgcaacaaaacagatggtaatagttcagatgcatatatgtaattttttctgcctgagatctgggttccttattccttatcattaagatcactttagaaatttgagaagaaataa

SEQ ID NO: 4103 - DNA, 352 bp, Bos taurus
  Clone ID: 56-LIB3058-048-Q1-K1-F12
ggaacacaagttgttaagcttattttgttacagccgtgagcatcatcagacatgcaggtgggcgcccgttctcagaaactaccctgcgtggcccgtgcactatgcctgctctgagggctctggacagaggcctcgcgggccaggccctgggctggaggtgactgtggagctctgggcccggggcctccatgttaagtcggggcagagtggatgttctgctttgggtttctgttggctcactctgtccctccctgcaccccttctgggccctgcattcacgtccatagctcctggatggggagacagtgaagccaggtttctcttttctaaatgttatttttggatttttata

SEQ ID NO: 4104 - DNA, 384 bp, Bos taurus
  Clone ID: 56-LIB3058-048-Q1-K1-F8
ggtctagatcgcgagcggccgccccgtatttctttcgttttgcatgcaggaaaagcgtgattaagtcataaaactatgattattttttttaaacagggatgtagaatacttaaaccttttaaatgacctatgaaaccactgggctatatttagtaagcaagattcactttaacaattctgtgtggtcccacccttaatgcttaactataggacattcatttatttatcatgattaggatttctggcttacagtcatctgtcagaccttttgctgcaaaaacgtgttttttaacaattaaatacacaatggggagatatggttagacatttacaggacttgaaatgtcgaagaatgatacacaatcttaggatcacacgaagggc

SEQ ID NO: 4105 - DNA, 54 bp, Bos taurus
  unsure (18),(21): unsure at all n locations; Clone ID: 56-LIB3058-050-Q1-K1-F8
cggacgcgagggttgagnatngaaataaagtaatacacaagaacagtgcatact

SEQ ID NO: 4106 - DNA, 425 bp, Bos taurus
  unsure (324): Clone ID: 56-LIB3058-051-Q1-K1-F8
aaatcactaggattatttccagagattctagataacttcagattcacatttatatcactgcttttaaccctcatttttttgtgaatcccactttttcagaactatcattagatttatatacaaaggagcttctaagaaagttatttcctatgtatgttagaagctttctggcagtttggaattttaagcgaagacttatcttactattttgttggcaaacatgtctttattactgatagcatatataatgtacactgtggttaaaattaatagcaccagattctgaagtgaagatcaaaatttggattcatgaaatgctgattntttaaagcattctgatgggcaaaacttggatgaaaatattttgtgggaaaataagttatatatcaacaaaagtgtgtttctttcaaaaattaaaagaaata

SEQ ID NO: 4107 - DNA, 394 bp, Bos taurus
  Clone ID: 56-LIB3058-052-Q1-K1-F8
cggacgcgtgggaaaaatggtaactttctccattgaattaaaagatgttttaaaattagtcaaaaaaaaaaaaaaacagaaaagggagctctgacagtgatggcaaaatccttacagccatactaaataagtttgcagtgccctttaaaaaaaaaaaaaattttttgcctaattacctaatcagtccagtttattttctttcctggtcagcttttcagtgatggaaaagttaatcctgtgaaaaatgacccattagaacaatgaagttacaagctagtttttgagaactggaaatataagacaaacaatatctttatgtagagacagagatttacaatgcagtattttaatattaggttgatgcaaatgaagtttcagactgtgacttttaaat

SEQ ID NO: 4108 - DNA, 410 bp, Bos taurus
  Clone ID: 56-LIB3058-054-Q1-K1-F12
gcgttccccatttaggcagcggccgtggtttctaccatagatggatgtgggcagtgctgggttgagggtgttatgtgtgtaacccagactgcgggatctgcagttaaagttcgtttctggtcacgactccaaaaacccaccctcttgagggtcaagaatcgccgcttttttctagttcccgcaagttcctcatctgtccctggcttgttccccgcgccaccttcggacaccctcaagtccctgaaaccctcagactcaaactatgagccttcggcagctgcttttgcgcttgccccgttatcttggggcctcgggtcccctgcgtggccccctcgacaccatctcttcggtgatctcctgtcgtggtcagtcctccaggtccccggcccagtggaaccaagtggtgtcag

SEQ ID NO: 4109 - DNA, 440 bp, Bos taurus
  Clone ID: 56-LIB3058-054-Q1-K1-F8
agaaaacattgtgcttttaattgagtcttggttgttttgtgcttttacctaaatatgttatttttagactgtattttaaccacagccacagggatcatgtttcattgcacttacctatttgccatgtctgcctatccttggtaaatacattactatctccaaattgcctaaaatctgctatgattctacagtaaatagctcaggggatttctatttatcactaataaaagggcaccatagtatgttttggtactttaggcagtaaacagctgctgggtttattattttattattaaattaggacaagaacatcaaatggatttgctgcactagtaatctttgtactgttgagcaacttggtttgcttatctgttgtgttggttgaagaacccatccctttttttttgtcgtgtgatatgaagttagagtgcctttttata

SEQ ID NO: 4110 - DNA, 452 bp, Bos taurus
  Clone ID: 56-LIB3058-058-Q1-K1-F8
tcgggacattaaagccttcggagcatcacagctgtcagacagtgttacagtgccatgttacagctgagttttatttagaaagtaaaggaaaatacatcctcgaggtgcgagggcatgccgacccagaagatgcgaagagaagagagagcgcgcgtgcactggagagagacccctggccctttggctcctcttcttatatgtcttttcctccccctgggcctgctctgtaaactgggccagccaggagtgctgtttgtttttcctgaggtcctcactccggtcctcagaccttcctttgagacataacaatgtatcagttgagtttttcacccccagaaacgcatggttcccagagcaggacccacacgccctgtcctgttcgccctgtggtgcttggatgtgcagtgagataaaggatgctgtgagcctcggacttagagaccagtctcatg

SEQ ID NO: 4111 - DNA, 325 bp, Bos taurus
  Clone ID: 57-LIB3058-002-Q1-K1-G2
agccttctcatcgccaccaatggccactgccgaggtccagaccccgaccgtcgtggcggccgaggaagcgcccgtggtggagaccccgccgccggccgtcgtgcccgaggagtctgcccccgccgaggccgaggccgaggccgaggctgctgctcctgctgatcccgaggagcttcccgcggccgagcagcaggcagccgccgaggcggaggccgcggctcctgctggtgccgaggagcccgtcgcggccgaaccggccgccgaggcggaggctgctgctcctgctggtcccgaggagactcctgcggtcgagcaggaggcagcc

SEQ ID NO: 4112 - DNA, 436 bp, Bos taurus
  Clone ID: 57-LIB3058-003-Q1-K1-G2
ccaggctctgctgtccctgggattctccaggcaagaacacaggagtgggtctagataggctgtgcttggctaatatccttgcacagtgtggtgaggaggagtagatctgaacacagactgagcattttcttcagagcagcacctgcccccagtctttggcccagaaaggtcaagtctggtcttacctacttgcctctcttgtccagtggcaactcttatgtgttggggaaaggtcctttgattagcctgtctgtgccacacaggtccacaataggaatctgatatgtgttcatgtgggttaacaggtcttgccccagtgagaagggttggctgaggttttctatttagtcattacattctcctcagcatgagtgtctttggataggaagtctcagtaagccaattgccttatcagttaggattctgtccatgtcaa

SEQ ID NO: 4113 - DNA, 457 bp, Bos taurus
  Clone ID: 57-LIB3058-005-Q1-K1-G2
gacaccacgcgctgcgagtaatctgcgtcgctaacttttgctggctctcaagttggaacccgaactcgagggtgccttgttgctagatttttatctaatcttttcaagctgtttaaaatgatctgaactcctatctctttttaaactggacttctttcagttttcttatattgttctaggagtatattcatagttacctgtttttcaggttaaaattagcatatgatcattcattatgcttgaaatccctgctatctttacctcattatgactatgtgaattggactatatttgccattcttttcttgaccaacctgccaaacagtgtatagcttattattattttaagagaataatacttttgactctgtaactgtctctaattttgcattttatgttcgagcttatctgttagcagatctttccttatacttactgtgtgtgtcttctgcaagtt

SEQ ID NO: 4114 - DNA, 386 bp, Bos taurus
  unsure (336),(340): unsure at all n locations; Clone ID: 57-LIB3058-007-Q1-K1-G10
agaggtaccaacacgtttgtaagggggtggggcaacaatggaacatttccagctgggttgacagctgcatagctaagtatggagacaagaaatcttggagaggatgtaggttggcttgggggaggggaggagaggccggcagtcaccctatgaggaagtgcatggcttgtgcattcacgagccaggaagaattccaagaattggtataggggaataaacccagatctcggagaatgaaacaagttggccccatctttcctgtgacaggtccagcctgaagacttcaccctcctcattccagtcacctttataccagatgcacctcagtcacacacncctncccgctcccagtaagcagcttctcaattcagacaaataagcttaca

SEQ ID NO: 4115 - DNA, 396 bp, Bos taurus
  Clone ID: 57-LIB3058-007-Q1-K1-G2
cggccgcccttttttttttttttggttacagtgcttttaatttaatgcagttccaagcgaccaattagtttatgatttccaagtttgtgtccttaaagcttaagagaaaaaggatagataagcttaatccttaatttgaattttcctgggagtgattcttaatatttgtaacttgattttttttgaattggtggctacaaaagcataaaggtcataaaattccctggcttcaccaacagctggaagcagaccctgtctgcacagacagatcaagaatgaccttcaccgcacatcagacacatccatcataaccttcattctacagacagaacaggaggtgcaggtgcttgggtatggccatctccagggcagagctgtgacctgccctgagccccc

SEQ ID NO: 4116 - DNA, 303 bp, Bos taurus
  Clone ID: 57-LIB3058-008-Q1-K1-G2
gttctatatcgagagcgggcgccctttttttttgtttccgtttcctgatacgtgctgtcaattacgcccattccaaagatacctactttcccagttaaagacgacgcgtggcgaggcctggctgtgtctctgcagagggggctgtgagctacacacgggggccagcttctgccaggcctcactggccgacacgccacagcgtctggcctggggcgctgctccctgctggcagccccaggccctatgggcccggaccccattgggggaggcccatgcatccatttacactgatattaacgatgt

SEQ ID NO: 4117 - DNA, 185 bp, Bos taurus
  Clone ID: 57-LIB3058-009-Q1-K1-G10
ctcttcctttttgtttggtttggtgggcatttatcctgttcctttacctgctgggtattcctctgccttttcatcttgtttatattgctgtgtttggggtggcctttctgtattttggctgtttgtggagttctttttattgtagagtttcctcacttggggtgggaatggatgggtggcttgtc

SEQ ID NO: 4118 - DNA, 411 bp, Bos taurus
  Clone ID: 57-LIB3058-010-Q1-K1-G10
atcctttccttctcctcactcctttcctttcccctctctttacttacatgtgggtgagtgagaagcacctctcattccttttccttctagctgcttccccccttccccgctccttctttccccaagatcacagaactaagccatatacagccttgcttatgtcactggcacacacctcttccatctctcccatggctttgaggtcaggactgcatcacgtgcatgcacgtcccttagtagctaacaggtggctccctggaaggacggtcaccattcattgctgtttgccaaaggctagtaggaagcggggctttggaagcagatggtgtgtcaggaacacaggtgatggctgttcactggacacccccacgtgaagagctactccctgatctgtgtcctctgaccctacca

SEQ ID NO: 4119 - DNA, 243 bp, Bos taurus
  Clone ID: 57-LIB3058-014-Q1-K1-G2
gaaaatgatgcaccccaaaaaatcctttgagaaacataattgcttcaaaacatttatgtagttggaatgctatatttaagtgaaaatttgaactgtcatgtacaaataaattctaagatgcatgcttagtgctctgcacggcatttatgtgattgatattgatgggatagattttatgtttaagttctgacactcctgttgtacccactgttattgtattatcttgctatgttatgtgctttc

SEQ ID NO: 4120 - DNA, 307 bp, Bos taurus
  Clone ID: 57-LIB3058-015-Q1-K1-G2
tgcctagtccctctccaaatggggagctttctccctgtcctgtgagaggggcagaatcagccccagagtggcctgctttgggcctgtcgggggaggaggggagggaaagggaggcaaggcaagggctgcttcgtgctgcctcacatagaccagaattcttgtccccatgcctcagctacaagagggatgaggcaagggctgcagggaggagtctgggcttttgagctgacatggcgccagggacccctttgctctgacctctgccaggccccacagggcatcaatggatctctcagtgtttgttcac

SEQ ID NO: 4121 - DNA, 310 bp, Bos taurus
  Clone ID: 57-LIB3058-016-Q1-K1-G2
cgcgagcggccgacctttttttttagactggtttaggaagcttgtttttatttttgcgggcgggcccactttactgggcctgctgtgccccggccgtctagggctggcccgaccgtgagcgttacagcaaacgaccctatttggacttttgaaaccttccgagtttcccccaaaaaaaatggtcatggagttaccaaccttttaacctgttaattaccgaaaacgtcccggaaggccttccaaatggattttgttccagggaagcctttggttgccgaccccggccagaacccattccagggggaaccca

SEQ ID NO: 4122 - DNA, 439 bp, Bos taurus
  Clone ID: 57-LIB3058-018-Q1-K1-G10
caaatttgtatattttgaaaaaaaaaattatcattaaatcaatggctgtgggaatctctgacgctgggactctacataggaattgttattcagttgctaagttgtgtttgaccctgcaaacctacagactgcagcacactaggcttccctgtccttcactatctcccggaatttgttcaaaatcatagagtaccactaatcaaataaactcactcttgaatagtctagttcctctcaagcaagaggaattgatactgatcaaacttacagactaaaattaatgggttaaatgatgtggttaggttgtctgcaccaaatatattcacttctgttggttagacgaaagcacgtaaaaccattgtttttttagaacagatctgccaagccacaattaatttggagcacaatatgctggcaagctacatatatataaaataaa

SEQ ID NO: 4123 - DNA, 430 bp, Bos taurus
  Clone ID: 57-LIB3058-018-Q1-K1-G2
gttctagatcgcgagcggccgccctttttgttttttatttttttttttttcctttttttggcaggaaccatgggttattagggttaactgggttggtaccgcactacctgttacccgacacacagggccccactgacagcaggcatggagggaggcggttgagccgtgggcatgacagcaaaccaggaaactgtgtgggaagtcgctgtggtccaatggggggagtcagcaattggcgagggaaacagggggcctgcagggggctcccagcaccagggccgagggcacgccggggtcagcaccccaaccccagcaagagcgggcccagggggccgggacccccggcagccgcgggcagcatcttctggaaagccggtccgaacagaaccacctcccgtggcccaggcggcctgagtgacaagtccacatg

SEQ ID NO: 4124 - DNA, 426 bp, Bos taurus
  Clone ID: 57-LIB3058-019-Q1-K1-G10
gccaccttcggaaagcttcggctatccccgggagccccttctctcaattcgccctcccccggcccctcttcaacgcctgaaccctggtcctccttaaggggaaagaacctcgcctgatacatctctgtcgcagcctggcgagactcccaagtgaacagaaggaacgacagggccttatgtcacctccatcaggacaactcgtgattatgtccaggaactcctcgagggcagagactttgtccatctacttgcccttggatttgcccctaatgagtcccgacagtcccgaggccccaggagaaatctgaggaaacagggacgttggggtttgccttgctccttccagtggcgtgctctaaatctgatggtggcgacagagttcctgtgagtccgatccacaagatctgtctttgggatcattctctc

SEQ ID NO: 4125 - DNA, 464 bp, Bos taurus
  Clone ID: 57-LIB3058-021-Q1-K1-G10
tcgggccgtccttttttaataattcatctttactaattttatacaagaggaagaaaagtataggatttttgagtacatgtgaattaataaagatgaaatctcatagtgctcttgcttcttaagaatcaccaatgatcatcaaccttataatcttcagagtctacttttacaatagttcacagccttgtggcttttacacactataaatattctgagtataaatgtacatgaaagtgatatattctacactgatcctgtcgtgattaagcttatgaaggaaatgaacaacaggtcctacactatgttcaacattttgataccttctgtaaattccccttacaatttttaaaggagccatttcttcaatgaatcataagcctaaaaaatataagaagagtttgtagttaataaagtctagggttaataacccctaggaaaaacttccgaaactttccattccaaat

SEQ ID NO: 4126 - DNA, 441 bp, Bos taurus
  Clone ID: 57-LIB3058-025-Q1-K1-G2
gtggtgtcttctgagcagaggtgccctgtccactcagttcacaatgccctgtccaatggctggcccaaggtggaaggcaacaggtgtaggcagcagggccaagctggggtcagcctggcctttgggcatatccttgggcaccttgacccccactcccgtgcttttctatacctggtaggggtgggagctgcagacacgaccccattcattttcctctttgtgggctccctggcctaagctctcaccagccccccaactttgtgttccccctcatcgcccagcacctttctcaacatcaggaattaggccacacctgttcacctggcccatcctggcctcagcaccttcaggccacccccatggagatcctgcacctggcggagcccacacctggtatgggtcccacctgctgcaggtgctggttctgcaccaacgagcctg

SEQ ID NO: 4127 - DNA, 369 bp, Bos taurus
  Clone ID: 57-LIB3058-027-Q1-K1-G10
tcgattgggacttctctgacagtagttcaaagtttgtgctttcaacgcacggggtgagggggcaatccctgatcaggggactgaaatcccatattctgcatgatgggcaattttttttttttaagtgatttgtgtgaatctgggtgaaattaagcggtcaccaaccaccattccttccaagcaagtaagtctctggggacttggtatttcacacggaaacttagaacttttaaaactcatttttcaaataccccttgctttgggcttcttttttcaaagggttcttccttacaacttcttcaaaattttctaaggtggcccaaaattttttgttaaaatttctattccttgagttcctttgaccttttt

SEQ ID NO: 4128 - DNA, 414 bp, Bos taurus
  Clone ID: 57-LIB3058-029-Q1-K1-G2
gcgcaaggcacgtgccagggccctgattgtacgaatgcgtgatcatgtgacgcatacgtgtcatcggcacttgcgtgactgtctgctgctgactctcgaatgggtctcaacacacactgccgaggactcggatccactaccgcagacctcaagcaccccatcaccaacgcaatctagctaagccattgcggtcacagacagtattacatgagaagccccaagagctgagacccccggcctgagacaccgaagacaagcagcagcaccagaacccagcgttgcgcttgcatcaacgccgtcacctgcggactccactcaggagcccctgttactttagactgaaaatcctcaatgaattctgagcaggtggccaacagcctggccccacaacaccattgtctccctgataaagac

SEQ ID NO: 4129 - DNA, 73 bp, Bos taurus
  Clone ID: 57-LIB3058-033-Q1-K1-G10
tcgagatgttgatacctaacttaccaatatgaattagtgtgcaaacattgttctagtactgccaagggtaagg

SEQ ID NO: 4130 - DNA, 401 bp, Bos taurus
  Clone ID: 57-LIB3058-037-Q1-K1-G10
cagtgcttatgtgcttgattatgtcattatttttcatgtcttcccctgagttaaaagcctactaggaacctgtataaaatagaatttgaaatttcagaataagaaccacagaactcggtacgttatatctaaatgctacgtaaattataattggaatccacgtctcaactcactaggatacatttttataaaatgtttctctgtatcttgaattaaaattacttgaccagaggcagaattcgagggttgtaatgcattttgaggaattttttaaaaggagagttgagagcaagagggttatactcactttatggttttgatatcggtgttttaaaatacatcagtggctcccgaacctgattgctcctttgtgtcactctgtggagcttttgaaatacagc

SEQ ID NO: 4131 - DNA, 108 bp, Bos taurus
  unsure (69),(82): unsure at all n locations; Clone ID: 57-LIB3058-038-Q1-K1-G2
cgacccacgcgttcggttgaatatatggcccaaagtaaaaatactcataatgaacagaagtttcagctntcattgtgcgaangcttcagaaatacctgcttcagtaac

SEQ ID NO: 4132 - DNA, 444 bp, Bos taurus
  Clone ID: 57-LIB3058-039-Q1-K1-G2
aatgtacatggccaccagcagcatatgttcgtgtttaccatagcctaaccaacactggatgtagtctttaaaaaataagcttcaaataaagaaaaaataataagcttcactatttttaactatgttttcagcttcattttaagtactgcactatcaatatgtagtattttgctttttttcaaatacgtcattatttcattagcttcatgctaagtttcttgaaatttagtttttaaatagggaatgtctcagatagttttgagagaacctcaatttgaacgacaaatttagatcttcaaacgtaaaattctgtctcctgcagtgtgttctttttaaatccctaggcatacttatttattagtattatatatatgtatattttgtgcctgtgtctaagattaatcctaaggattctaccacttgagctaaagattttcttttctg

SEQ ID NO: 4133 - DNA, 452 bp, Bos taurus
  unsure (36),(420): unsure at all n locations; Clone ID: 57-LIB3058-040-Q1-K1-G2
ccacgcgtccgcagaaatcagagatggtgagccctngattagtgatcttctttccttaactaactagtagatatgatcttagtcaaatgatattttttctctgaacctgagttttctgtttgcaaaaatgtggataatgccacttttccatactcctttaccgacttttgctagaccaagtaggaaaacattaatgcttggaaagccataaaacagtgtgcagatagatagactttattgatttaatgcatagtcagagtgtttaggagccagatacacctgtattcagctgttgcattatccatttattagcttagtgtaattttagtttctgtgtgtagaaaacttactaacacctacttcagggttgtaaggaagaaataagataatcttaaatttcaagaataataaggatatgtntcattcccacttcttagatgaagatttgaaac

SEQ ID NO: 4134 - DNA, 419 bp, Bos taurus
  Clone ID: 57-LIB3058-045-Q1-K1-G10
cggacgcgtgggcggacgcgtgggctttgttgagagacctgtgaaatggcctcaggtccgaagcagcattctcagttttgatgaagcctaaaatgtagaatagtctttcagtaggttgtgagctatcataaagcgggatatctctaaagccctggcgaagtaccatccttgcctttggcttgcaaactggaagaagcgggcgtgatttgccagcctcttcctgggactcgtgtgtttgttctcagctgatctgatcttcaccccactccccgtccagtggacgttatgttgttggaaacatctccgtcatcatcccccatctgcccacccccaccccacttctgagtatcgccgtgcctttttattcatacttcagaggctgagctccatgcctgttcagaaatctcccagatcctaca

SEQ ID NO: 4135 - DNA, 403 bp, Bos taurus
  Clone ID: 57-LIB3058-048-Q1-K1-G2
ctggacagaaggggtcaggtttctggatgcaagtggaggtcctggaagtctggttcccaccttgacagcctcttcccataggcaatgcgcacccaggcgccggagggcagagcaggaccaaaagctgccaatcactgcacctgccatctctgtgaagaggcccacttctaacagactgggctgactcccatcatgcaaggcaggatcagcctccccactctctgccacttccttctcccttgggccttcaccaccttccacagagccctggggagccaagcaccccaccctggcccccactacctcctgccccccatccacgaggtcattcactctcgtcgtggggccacgaccacgctgccctgcgtcctgggcgccccgccttccagctacaaagtgcgct

SEQ ID NO: 4136 - DNA, 376 bp, Bos taurus
  Clone ID: 57-LIB3058-049-Q1-K1-G2
ctgcttcataccacagacctttcatttatgaatttcagttattctgtcaggtgaatcatgaaccttgatattagagggaaaaaaaaaaacttaccctgtaaaagtttttacttactcaatatcagtttggatgtttttttctgaattttgttcatgtggaaacttaattccaggacatcttgatttgaatcaggtaaaccaatcaagcaatttaaaaagagataaatggccaagtcagttcctatttaaactgaatgtattaaatgcttaccagtgaaatttctggagattagtagaatatttagtgcaattctaaagcttctgctctcaaattctgtctttggcatgacataatagctgaacatttttcttttaa

SEQ ID NO: 4137 - DNA, 326 bp, Bos taurus
  Clone ID: 57-LIB3058-052-Q1-K1-G2
gttttgtagttgtccttgttgatttgtgtgatgttaaagtattagtagtaactgccaggaaactgtcattagggagggtgtagtcggttgctgtttggactgggagggatgattgaaatttagtgctagaaacaaatgttagtggctgcacagtttatcatttgtcagacagaaggtagctatacagctgccctgttaagtcagatcaaaaaagttcagaggaagattagtaagtatttatcaattaaaaaaaaaacattttatctttctaacatcttaacatgttctcccctttaggaggaagaacgtgcaaaacgtgaggagct

SEQ ID NO: 4138 - DNA, 213 bp, Bos taurus
  Clone ID: 57-LIB3058-054-Q1-K1-G2
cccggctcgacccactcgtccgattgaatcatcattttagtgaactctattatcattcaaactacaaatgtttacagtttgctcttttgatttcaactctacaagacatgtttttaaggtcaaatagctaaaatggatcattgaggtagttaatatttgaactgaatagtttattagttaactcttagaaaagattctgtgaaggttataatt

SEQ ID NO: 4139 - DNA, 185 bp, Bos taurus
  Clone ID: 57-LIB3058-058-Q1-K1-G2
acggttctagatcgcgagcggccgccctttttttttattttgtgatatgatccttttcatttttagtatatgaggatgatatggttttcttgctgtactgaatagcgtgaaacattttagctccgtgatcagacatagagtgctgaccgaatgcattgagaacatggagtcttaaccactgtacc

SEQ ID NO: 4140 - DNA, 445 bp, Bos taurus
  Clone ID: 58-LIB3058-004-Q1-K1-G6
gcgagcggccgcccttttttttttttttttttttttgaaatgcagtagctcgcttttaataacagcatacaaaatctggagaagccccaaaggagtccccgtttcccggagctcgaagcaaacccttggagcacgaaggacagaaacggacgggaacacgagcccctcctgcttccccctctcctcccccaggggggtcgctacccgcacaccagagacccttcagatacccctgagggtgcgcacagagcagcagagacccagctgacggcttatcccgtgggaagcggcaggagcgacgtttctgctcccggggaggctcgcggttctgagaggagcacgctgtgtccccacacacagaaaccttccatccaagctggaaggaggcctgaccagccccaggccatggggaagccaatgcctctttgcctcactgattagccta

SEQ ID NO: 4141 - DNA, 457 bp, Bos taurus
  Clone ID: 58-LIB3058-005-Q1-K1-G10
tgaaaaagccacttaaggacagctgtgtactatgaatatttaacttcatttatttgccttgcttagcattttacttactgtcttgccatgaaacttagtattgcactgtatacattttagaatagtggtaaaaatgttctgtagtactgaaaataaccaacatagaacaccaagccagtgtggtgatttctcctgatatgtcaaaattctatatttcagtgatggctgttttggtctttgattcacctatgtgtcagtcctgctagagagacagattagtatcttagctttttttaaaatagagattatgatgaccttggtagttttcccatgaagtgattgtgtgattaaattattgaatgtaatgagacccttaattagaaaatcttttaatacaactttctcttttacgtttccattctcttcttgatttttgacatctattctcagaaaatgt

SEQ ID NO: 4142 - DNA, 437 bp, Bos taurus
  Clone ID: 58-LIB3058-005-Q1-K1-G6
tcgacttttccttattttattcatttcactaaacctttatcataaacaaatcattaacatatactgccaaagagctatacggatattttgtcaaattcaaaaagaacttccacttgcactgaacttataaaataggtatatatatacataaagcttttttagtccatatttaacttatcctggagctagaaaaaaattgttatcatggctttatattgcattataatgatctggtacataatatagtggctcaaagactccaagtgtatatgcaagataggttgtaactttaagtacccatcttcttatttcaagtgtttgtttatttttggtgtcaggtaaaagatttgcttaaaagttaagattctatacaaaacaccttggatgtagttttcttattatgtttcatattatttcttgaaaaaaatgtatataaa

SEQ ID NO: 4143 - DNA, 428 bp, Bos taurus
  Clone ID: 58-LIB3058-007-Q1-K1-G6
aaaaattctaacagcaaattcttttagtcttctgttttcatcatgtcttaagctaataatggccaagttatcatagtagaggttaaaaggacagactactttaagttgtcttctttgggtcttgaacattgtaagtcacccatgattctcaatatgatttattgagttgacaagaaaacaaaacaaaacacttcttcaaagtccaaagttgtgtaaataaagtgtaacatttcagtattacggatatctctgcatcttggattcttttaaacaaaccctttaaaggagttgttttaggattttcatcaaaacaagagtaccttctaaacaaaatgtgtagttactttgaagagttgctctaagctgttaaagagattttcttgaacggaagccctggggagagggaaaggagcatttgaaacatgaaa

SEQ ID NO: 4144 - DNA, 239 bp, Bos taurus
  Clone ID: 58-LIB3058-013-Q1-K1-G6
gtctgtgcatgcaaacactattttactttatctataaattctatcataatcagtgtgggttcaaaatataatggtgtttcatatgactcatgaagtgataactattctttagaatatatacatgttattcacttaataatttctactatgaataattttcttatttctttcaatcttaacatatcatatctttatacataattacttcatatataattttttatatattccttttatac

SEQ ID NO: 4145 - DNA, 302 bp, Bos taurus
  Clone ID: 58-LIB3058-020-Q1-K1-G10
cctgccgaagctgtcagatagccttcctactcaaatctaaagcagtattaagatcattactgcatgtgcactaaaaacccaagttttctgttcccttggggcagaaaattgcatggggtctggctttgttgtgcaactgacataggtcattgaaacttgattattccaccaaatggaaataaaactcaaatttctttagcactgtgtaaataaatctggatgtgtttaactttgtactggtaattttctgtatatttgcaatatttgggttagaaataaaacagactggactttattacctg

SEQ ID NO: 4146 - DNA, 386 bp, Bos taurus
  Clone ID: 58-LIB3058-024-Q1-K1-G10
tcggtctaaatcgcgagcggcgcgccgccttttccctcatgtttgtgatgggcgtgaacctgagctgttaatccaggatggggtatacagatcacttctttcatcaaattcagcttcccaggtgatgacttcccacagctgaccagcgacaccatcagaagaggtatagttagcttttctggctgttcctggtggtgcttcagtaatgcaatgttcaggtagagaggattattgtccagtacagcactggctttggcaacagccagtgacacagcccctatggccatgctgccacagaggacaggctcagggggttctgcaggtatgattggtttttctgcagaagtctccatccttccttgcttttgtccttttttcttggatgg

SEQ ID NO: 4147 - DNA, 87 bp, Bos taurus
  Clone ID: 58-LIB3058-025-Q1-K1-G6
gtcccctcttagtcaaatacaggggccttggtttagggaagagcagggatcactgtggggagaggagtgtgggtggcatcagatgct

SEQ ID NO: 4148 - DNA, 279 bp, Bos taurus
  Clone ID: 58-LIB3058-028-Q1-K1-G6
ctgtgggggtgataatccaagagctgttccctagggatggatggtactgtgtcattgggcaaacatttgcactgtttgctcccatgctgtgtagacatgccaaaataaagaaaataaaatccactcataactgacaaagtctggcttatagaaaatgtttcagaatgtgttttagcttttcaaaacacattttttacaaaaacattttatcgaaaaattcatagctttatctaagtgctgtcaactgtttcaccacagacaaaaatcattccacataaa

SEQ ID NO: 4149 - DNA, 432 bp, Bos taurus
  Clone ID: 58-LIB3058-029-Q1-K1-G6
gggcaaggcaggtgccatggccctgattgaaggggtaggtgatgaggtgaccattcggttctcggcgcttgcctgccttctggtgctggctctcgcctgggtctcaacgcacactgccgagggcgcggatccactgccccagccgtcagggaccccaacaccaacgcagcccagcgaagccatggcggtcacggacagcatcagaggggaggccccaggagctgagacccccggcctgagacaccgaggtcaggcagcaccaccagaacccagcgtggggcttgcagcaacgccgtcaccttcggactccccccaggagcccctggtacttcgactgaaattcctcaatgattctgagcaagtggccagagcctggccccacgacaccattggctccctgaaaaggacccagtttcccggccgggaacagca

SEQ ID NO: 4150 - DNA, 117 bp, Bos taurus
  Clone ID: 58-LIB3058-030-Q1-K1-G6
gttatggagtgccagcactcgcttctcggatagctaccggttgacactgtgagcttaagcgccagtaagtacatgtcgaatgcacgctgcggtgccagcgggactaggaggactact

SEQ ID NO: 4151 - DNA, 332 bp, Bos taurus
  Clone ID: 58-LIB3058-031-Q1-K1-G6
ttttcctgaacgctccatttcataaccactagtgtgcaggttgtcacagtgcctgctgacaggctgctgtggtttccagctctgggaacgcatggctcctgtcgcgtccccacgtgggcagggccgcaggaagtctccctctgcagcgctgggtgtgagtgagcccatgccaaggccaagggcccagcctgctcagatggcatcttccggcctttgccccaggagccattcttcatctgccctgaccagcaattgagaggctatttcttctgagatcttttctaagagcatgatttttttcagtatggcttaaagtggagttttctgattac

SEQ ID NO: 4152 - DNA, 100 bp, Bos taurus
  Clone ID: 58-LIB3058-032-Q1-K1-G6
cactctctctcatgtggtcactgggcattgctggccagccttactgcccgcctggtgagggtgtggtcagcattgggagacctaccattaaagcttggct

SEQ ID NO: 4153 - DNA, 415 bp, Bos taurus
  unsure (401),(405): unsure at all n locations; Clone ID: 58-LIB3058-034-Q1-K1-G6
gacccactcgtgcggctggacgcataacttagtgcagttatatttcaccttcagggagtataacaccccacactgcctatgaataccttggtctccgtatatggtcactaatctatatataacacatatctaaaaacacagtgtactatatagagtctacatgtaagatttcattctgtggaatcagcatttagctctcatcttggacaaaagcaaaacatttgcagacaaaaaagcaaagagttaaagtttcatttccagttgttgtcagatcctactaagcaggataaaattaaaaaattattaatgcagataactttggtatttctatttgccagcattcatctatcttcaagggataaaggtatctatctatgtatgtaccagtagaaaaaatatgnctgntcattttgat

SEQ ID NO: 4154 - DNA, 443 bp, Bos taurus
  Clone ID: 58-LIB3058-035-Q1-K1-G6
ctttgggatgttgggagagattctgccttttgatcctgcaggtatgtgagccccctcggcaccttggggttttaacttaagtagtatcaccaaggactttatagggcctgtcatggccttccgtgtgggaggcagtgacttaatcccctttaaagaccctttctcactgtctgatggcaagtatggggcagctccagcaaagggaggaagcagtagttagaatgagtctgagaaggtaagtggaactattttcttattttgtagacgacagaattgaggctaagagaagccgaatgactcaaagtcccattagtcaagagggctccaatctgagccctcccattcagggcagccaaaatggcccttcgtgggcttcttttttcctaattacatattctgttctgtgattctcttttgcttaaagtctagaagccatgaaaggt

SEQ ID NO: 4155 - DNA, 460 bp, Bos taurus
  Clone ID: 58-LIB3058-036-Q1-K1-G6
gcttgacccacgcgtccggagtaaacagaagacttgtttttcatctgactagccaaaaatgttataacctgtaaggattccaaaaattatacattaagaataacagaatcagaacataaaattctaaaataactatgaaactgtgtagattaacatcttgattgatattaaatcttcaacagaatagtgaaagtaactctgatttacaaggtcccagtatttttgtcctatatatgacagttgtacatactcaagtgaggataataaaaccaactgaactgtgaatttaggatagaactggggtaattatgtacagcaagtttgtgtgccagttacagaacatggtattaaactttaaaaataccctacggctccggaccggccaacacacatagacaacttacccatgtatatagataggtaggtaaaggctgaatggatcagtactttagccaaagag

SEQ ID NO: 4156 - DNA, 153 bp, Bos taurus
  Clone ID: 58-LIB3058-039-Q1-K1-G6
cggacgcgtgggtttgatagttactcttatatgaacgtaggaagcttggactaatagcacttttcttcattcaaacatcttaaaatgaaagtacagcactgccattttaaatgtgtttaattcagtcaataaattttgttgcttctttacatt

SEQ ID NO: 4157 - DNA, 405 bp, Bos taurus
  Clone ID: 58-LIB3058-042-Q1-K1-G6
gttctagatcgcgagcggccgccctttttttttttccacatttgtctaacatgccatgttatggatgtgacataagtccctgttgatgggttcttgtgtgtttgctccaactttttaaaaataaatatttatttacctagctgtgtagggtcctagatgcagaatgtgggacctttcatcgcaaaccatggattctccagttgctccgtggcatatgaaatcccagttccctgaccagagatggaacttgcaaccccaatgctacaaggcaagctctcaaccactggaccaccaaagaagcccctgtctcaaccttttgctattacaagaatattacaatgagtgcactctcattcgctcaatcctcagtcgggtctgactctttgagaccttatggactgtagt

SEQ ID NO: 4158 - DNA, 419 bp, Bos taurus
  Clone ID: 58-LIB3058-044-Q1-K1-G10
ctggcagcgtggggtgaggtatatcgcgatgtcatgagacaggagtgaggaagtgaagtggctcattcacagtcaattatgcgataatcgcctacattagatacgaatgtgacaaagtgtatgacacaagactgtgacaaaacgtacacaaatctaatatgcactgacactggactgtgatgaaacacgtaacctatgtgttcaagcgcctgtgccatgacgttaatgcatagtactaattcattcgctatgcgagccatccgaactgtgcgatagaacgttacgtgaggcagtgctcagagcggagtagataggattgaggcctatagagagctctgagggaaacccgctatagataagagcccatagctcgaacacggcctagaaacggatacactctccatgcataacgtcatgga

SEQ ID NO: 4159 - DNA, 328 bp, Bos taurus
  Clone ID: 58-LIB3058-044-Q1-K1-G6
ccaggccgacccacgcgtccgcggacgcgtgggtaggcttctcagacctcgggacatggggaccccaaggtactcacagtgcacccggagactgacgtgtgaaaatgtggcgaccgaagctgctcactctggaaccttacaggcactgattgcagaatgactgcttttagaggaatgctcacctatcacaaaactcaaatctatggtaaattaagtggtacttctcatgaccctagcaaatggacatgtcctcagccttatgaccacagcctgagttcagaccccttgttatgaagctcggtgcctttggtcaagagcagcacatgtt

SEQ ID NO: 4160 - DNA, 370 bp, Bos taurus
  Clone ID: 58-LIB3058-046-Q1-K1-G6
cctgtacctgcctgtgaccctacttgtgtctcgaactcctgacctgcctaacctgcctgcctgactctacccgctacgctaccgcggctggcttgctccggaccaggtttcggccgcccttcaacctccgccccgcccgcccgcccgccctcaatgcaggtgtgcctacttcagcatgaaggactgcacttcaagggatgcctgctattccagctcaagcaacagatggagaagtgcagatcattgtcctttgttgaaaataatccacagcttgtcaacatatgtaacatgccagagcaacacttgggatggaactcaaaaaacaggttaggctctctttttgccaagccctgcgataaaatataaatca

SEQ ID NO: 4161 - DNA, 316 bp, Bos taurus
  Clone ID: 58-LIB3058-048-Q1-K1-G10
gtgagctcataattaccatcatatctattattttgattcatctgtttgttcctggaaccaggaatttttttttcttgttttcttttgagatttattgttgtttttttttaaaaaaagatcattatatctttctcaaattaccaagtgtttgcatagaattagggaaagacatgtagttcacatgcttctgcctttttttttgaatgtttttcttaacactttttgaatttcctccttctttgaaaaaggaaaaaattggaattaatctctattctggaattgaaaatgaggaaaaggttgaccatggttgatttaa

SEQ ID NO: 4162 - DNA, 370 bp, Bos taurus
  Clone ID: 58-LIB3058-049-Q1-K1-G6
ctgagatcagtttcgggaagagtttcttcgggtcagtttagtgaaaatgtcccaccatcgacatgtgattgaattcctcatcctccaccctggatgtgttaccgccctcgttaccaaccactgccggccttgtgcaagattcctgttgagttgttctagcaagaacctccggcccagaactccctatgtgcctcttttactggaggtgggcccaacttctctaatggagaacctcacgtcagtggtcttctttaccacattcagcaagtgtcagagagcaagtttctggatgatactcaagtagaacctcacactgggtaagggcatcagtgctcctaacatgttgcctggaaatgttcagctcttctgc

SEQ ID NO: 4163 - DNA, 339 bp, Bos taurus
  Clone ID: 58-LIB3058-052-Q1-K1-G6
gttttgtagttgtccttgttgatttgtttgatgttaaagtattagtagtaactgccaggaaactgtcattagggagggtgtagtcggttgctgtttggactgggagggatgattgaaatttagtgctagaaacaaatgttagtggctgcacagtttatcatttgtcagacagaaggtagctatacagctgccctgttaagtcagatcaaaaaagttcagaggaagattagtaagtatttatcaattaataaaaaaacatttgatcgttctaacatctttaacatgtcccttccctttaggaggaagaaacgtgcaaatcgtgaggagctggagcgaata

SEQ ID NO: 4164 - DNA, 275 bp, Bos taurus
  Clone ID: 58-LIB3058-054-Q1-K1-G6
gttctagatcatatgactagtttaaattaagagctgctgacaaattgaagagaatgggttctttctgggaagctggacaccaattagtatgtcattctgcatcattctctctaaattacagggtgtttctaattggctgggctctttacctggctcatcacataccactactctctcttattttgtcatcttcctttattttcacccgcttgttgctaaattaaaatcaaaatcaagcatactgaaattgaacatgccattgagaatcataagtt

SEQ ID NO: 4165 - DNA, 311 bp, Bos taurus
  Clone ID: 58-LIB3058-056-Q1-K1-G10
gggaccgtgggcggaccgtggggcgccaacagcctagagcgtatggtcctgcatggcccggcctggcgctgtcattgagcgcatgtcctgcaatggtggcggtcttgtactgtgcttccttactgtatgttatgtctgtctgttatgtacttaacgtttttcgagcctctgttcgtctttgaagggagaccattgcttatctgtcctgagttaactttacctcctggctactgtactgtgttatctcttggttcttcaatttattatgaacttttctgtttatttatagcacatgtgagacaagtgttttc

SEQ ID NO: 4166 - DNA, 417 bp, Bos taurus
  Clone ID: 58-LIB3058-056-Q1-K1-G6
aaaaattcttggtaaaagctttaggaaaaggataattttttaacttgaactacttagtcacttttttcaagccaccaaaacttaggtcacttttccatagcttataagttatgtttttactgatactttattttaaatctgagccattgctggcagtaccttaaaataaaaaatcacatcattaaatgttttgggagaatgttgtataaaattcacaaaaaaagagacagccaaatgtttgagaattttaatcccaagaagtaaacatcctagagtcagactccacatgctgttcagtcttttacatgtttctatgactgaatgtaatttaattaatcaggagttaataattaataatgcaaacatgttacagtggttgtttattattgctctttataaacttaattgctttaactt

SEQ ID NO: 4167 - DNA, 390 bp, Bos taurus
  Clone ID: 58-LIB3058-058-Q1-K1-G10
aataaaggcaattattttttctcattgcctcactggtttcagaagagagcaattttatgataaatattgtatggactttgtatattaagagaggagctcatttcggattcctgaagaaagagacatttcactgttattttttgaaggggcatcttttgactttttgttgtccacacttttggcgtatgtatataagtagtattgatggtgatataaaacttttgttatgtgaaaatatttaagtctgaaaacttaaataatattactttttttttttcaaactgctttgtgtattggatatttttttaaagaaaaaaaaaagccttaattgacttgggatactggacttctggattctgagggttttcttgaatgtcaatgtgtgtacct

SEQ ID NO: 4168 - DNA, 90 bp, Bos taurus
  Clone ID: 59-LIB3058-003-Q1-K1-G4
cttactcgttaatggaggtggactctaataaaagagagaatcttggtcagctagaaaaggaacaatgatacacgaaaccaagggcataca

SEQ ID NO: 4169 - DNA, 371 bp, Bos taurus
  Clone ID: 59-LIB3058-004-Q1-K1-G12
gctacatcctggggctatctaccttccagcaactgcggtgatggagagacctgacagaggcctttgcaaagggtttgaattggcctcctgtgtcaaagatatctgctgcagggggctatcttccttttttgttctgctgaccaaactctcctctttcacagctgagaacacctttgattcccttcaagcctcagccacagagttcagggacctgatccgccttgcctcagcagtcactattcagtaatgccaggttgcagccctgcaagtctcgtctgccttctgcttcaccctgcttatagctgctgcccacctccaggaacctgatgtcacacagaaacagatcttatcagtaagaggtgtgtgaggaa

SEQ ID NO: 4170 - DNA, 402 bp, Bos taurus
  Clone ID: 59-LIB3058-006-Q1-K1-G4
gtgcccactggtgccagggcccatccgggcctttgtcctcctgtagtgactccaacaacctgaaagtcagcaacgtgcgcctgccgcgcgagaacatgtccctcccgtccaaccttcagctcaatgacctcgctccaggctgcagagggaaaccagcggaccggcagatggctcaggacaacagccggccagaccttctggacccggagcctggtggcctcctcaccagccgaggtttcatccgccttccaatgctgggctacatttaccgggtgtccagtgtgagcagtgatgaaatctggctctgagatgtggccaagacagagggtaccttcttggcccctgggcatcttcctggtcctcgtccaaagcatcctctgcctggccatgttgccaatggga

SEQ ID NO: 4171 - DNA, 410 bp, Bos taurus
  Clone ID: 59-LIB3058-008-Q1-K1-G4
gaaagactagatggattcaaaagttcagaccatggcattcattgatgtagaacgcatggtatttctccacaaggtaacctgctgtatttatttatttatcttttggtttaaatataatttccaaactttgtggtcaggcagcgtctaaagttacgttaccacaggctgacagttggtatatgtaccaatcaattcctccattagattcatacaggtttagttaagtagcattaaataggattcttagaagtatgttcttcatagtacttttaatacttaaggctttgtacaactatccatgaacggaaagcctcagcataactgctcagggaaatagggctaaataactgaacattaaataattggttaaaggtgctgttagtcgagcctcaatgcttgctacacggatg

SEQ ID NO: 4172 - DNA, 290 bp, Bos taurus
  Clone ID: 59-LIB3058-009-Q1-K1-G4
atcgcaaacggccagccttttttttttttttttttttttttttttttttttaattaagggggtattactttattggaatactcaaaaacagtgcatactttccttgaaacccttggtaacagttttcactgttgggtttgtccactaatggtggtcactaagtcacaaccagctaaatgacccaatgtgtgtctaaagcaatttggaaattttgtttctgaaatatcctttattatttcttaacctttcatcattgaggctatgtattaatacacattatatttaactca

SEQ ID NO: 4173 - DNA, 431 bp, Bos taurus
  Clone ID: 59-LIB3058-010-Q1-K1-G4
ccaggacccagccaggtgacgacagtggttagagcacgcagcagatgggagctcctgggcatgtgagacagaagagaggccccagcggggggcagtgggctcctctggttccccaggttgtcaatggaaccgattcctaatcttgggatggtaatggcttcgaccacctcggccaagcccacactatacctcactgagacagtgcatctcacttcaaggggttgtggtcaagtaaactgatttgggttctgatggttaggaagagaaagaggtaatgtcgaccctcagataacctggcccagggcagctgactccccgacccctacccagaccccggctctgctggaaccccaaactctgccatccttttgttctgccgtttccccctcacacgtagatttgtctcttcatgcgtgagctttccttttttg

SEQ ID NO: 4174 - DNA, 430 bp, Bos taurus
  unsure (68),(350),(389): unsure at all n locations; Clone ID: 59-LIB3058-011-Q1-K1-G4
tcggcgggcctctgtatacatggcttctttccatcacaaaacgggtagaaacattttcactgcttcanggctctcatctgtgtgtcgtcttatggctccatttctataagataactctgtaattttgatacatgctgtattttctttcaatgactaagtttaaaaggcttgggttctgttcagcaaattggccatactgccattgtagcccttcccttcagtatggtttagcgtgcagctcagtcattagactttccttgtctacccagtcaatacacatcttcgctgtttgaaaggtgttacagcagttggagaatcttcatgaacctgaagattatttcttgtgaatntgaatgcaaatgtactgtcattcatagtgtttatatganaaaataccacgaatcttcacttttgctaccttgatatagca

SEQ ID NO: 4175 - DNA, 196 bp, Bos taurus
  Clone ID: 59-LIB3058-013-Q1-K1-G12
acggatgcaccagcagcacatactgccagttgggacacaacggcctctaccatgtctgcggcacctgtggaaaagtcagcttcctgggccaagtcgccacgtggctagtctactgcaggctgggcagacgctgactgatgtggacgccatagaaggaattctcatggatcgtgctctggatactcgtgctatctga

SEQ ID NO: 4176 - DNA, 61 bp, Bos taurus
  Clone ID: 59-LIB3058-014-Q1-K1-G4
gattccactcattcaatccttttgattttagaacatcttacacaagttcggggctcggttt

SEQ ID NO: 4177 - DNA, 195 bp, Bos taurus
  Clone ID: 59-LIB3058-016-Q1-K1-G4
gtaccttgtaagcgctggtgtaacttcgggcgcagttctttcggcttccactatgaagcgggcgaaattaaagaaagcaagtaaacgcatgacttgccacaagcggtataaaatccaaaaaaaggttcgagaacaccatcggaagttgaggaaagaggctaaagaacggggtcgaaagaagcctaggaaagaccc

SEQ ID NO: 4178 - DNA, 447 bp, Bos taurus
  Clone ID: 59-LIB3058-018-Q1-K1-G12
cacgcgtccggaaaacagaaaatctaccatggcttgaaggtaaagagcagaactcctgactaccattctatgactgatcaagcgactaatcgttaaaaacctcagcaggccttgatcacgatatgcagaaaaaaatgtgctgcagcttagatacctatggaatttttccacagtgtcacaggtttgaaatacttgaagccctacatttctaagaatatatttcttgctcaattgattcaggcaagcccaagactttgtaattattaaagggcccaagatttctttctatctttgatctttttcaataacagaccagcttctttttcctgcagttacagatgtaatttcctttttgttgtcaaacataaggtaccaaatatgatgcaataaatcgtttcgaaaaacgcattgatgtcaataaatatcaacaataataaaaaagggcgg

SEQ ID NO: 4179 - DNA, 152 bp, Bos taurus
  Clone ID: 59-LIB3058-018-Q1-K1-G4
gttctagatcgcgagcggccgcccttttttttttttggatttttttttttttatattgtttttggtatttttttttttttatggaaagggtttatgtgagctatttgaacaagtggcaatattcagactgaagtaaaataaaattttagatt

SEQ ID NO: 4180 - DNA, 380 bp, Bos taurus
  Clone ID: 59-LIB3058-021-Q1-K1-G4
cgggatgccaagaggggggcggctggggggttggagatggtggaattaagtgtgatctctaatggccctctggggctgctctggtccccaggtacgccatcactgtctggtattttgatgccaaggagcgagcagcagccaaagacaagtatcagctaggtacctgcttcccaaatggtgaccccgcctcttaagtccttctgttccatgtacttctttaggcctcaagctgtctcatcaatctctgatgaatctcatcatctcttgatgaatctcaagtcactgaaccttgcagctcatttttccccatctttgcctactttccctagacagttgactcacctggtgtccccagcatgagccccatctcttctgatgct

SEQ ID NO: 4181 - DNA, 314 bp, Bos taurus
  Clone ID: 59-LIB3058-022-Q1-K1-G4
tagccattgaagactggcagaagaccgaggcccagatgcgacgcgagcaactcctcctggatgaactggtggccctagtggacaagcgcgactcgctcgtcagggacttggacgcgcatgagaagcaggccgaagaagaagatgaacatttggagcgaactctggagcaaaacaaaggcaagatggccaagaaagaagagaaatgtgtccttcattagaaaccggaccagaatcctgaccaacattttattagccttgggttccccagaccataaataaaaaatcattctcagtgatttaaaactttttaacaa

SEQ ID NO: 4182 - DNA, 227 bp, Bos taurus
  Clone ID: 59-LIB3058-023-Q1-K1-G4
ctgcatcgagagtcactagaacctgagtaccatgtctagactggatgcgcgagctctggcaccggcgtctccgcacggagtgctctactcagagaactagattgcaagcctcaaaatcatggcaaagcaacagtggtataacgggtaagacgcgaactgttaaactgtgaacgaaagctacagtgagccgactcaagctccagaccaagagtgatcttgaactttta

SEQ ID NO: 4183 - DNA, 328 bp, Bos taurus
  Clone ID: 59-LIB3058-024-Q1-K1-G4
aagttggaccccaccatacatggccgttttgcctgaagtagacaaccccagctgcctgaaagaggactcattgcttccaggagggattcctactttgagtatcgagctgtcatcttggggatcaccacatgagggtgccatgggaccacagctgcctctccttcccactcaggaagtctaggtcccatggggtagcccagccaaagagaaagaagagtggctcagcagcggtgaaaggggaaagttctttcccagcaagagaagagaatggcacatagatcccaatggaaattaaagttttatggcatgcgtgaaggaagctggcatt

SEQ ID NO: 4184 - DNA, 303 bp, Bos taurus
  Clone ID: 59-LIB3058-027-Q1-K1-G12
gcaaatactgaattggaaaaggagggaggtggagttcaacactgtctctcaatcagatcgatcggatcttttttcgttatgtccctgcccctccctaaatcccatatcttggtcataaatattgcattattcacactttcaaactgtgtattttcttacaataaaaaatgatggaaaaaaaaaaggctttacttcttttgcatgcactttaaaaaaaaaaaaaaaacatttttcaggttccaaggaagagcatgataactgtcagagcttttaattatatttgtaaataaaagtgttcatcac

SEQ ID NO: 4185 - DNA, 93 bp, Bos taurus
  Clone ID: 59-LIB3058-029-Q1-K1-G12
aggagccctcctggggcacgggcagtccatgacccacatctgtacccccagagcctgacacactgtaggcacttaataaatgtgtgttgaatg

SEQ ID NO: 4186 - DNA, 242 bp, Bos taurus
  Clone ID: 59-LIB3058-033-Q1-K1-G12
atatgttgatcctaattaccattttgaatatggtgcgcacattgatctaaactgccaggtgactgtccagtacccattggtcgaaaacctactcactgcaaacgtctaccctgcctgagatacgctccttagatgcctacaatctgaacccgctcaacatggatgttgctaccaacaacttctaaaagaaccctatgacccctccaaaacacttctaataggcatatatgacctcattggga

SEQ ID NO: 4187 - DNA, 433 bp, Bos taurus
  unsure (413): Clone ID: 59-LIB3058-034-Q1-K1-G12
caaacatataagcgagtaacacattccctgctagtcccagaaacaggcccaacaaggttatgtttgacttgccccagagtacctacccactggtggggaaagcaagccattactctcgccattcagcagcaggaataggctgtgaattgctagcagttttgttttcttttgcttttttagcagttactttttggtttgttcctcaaatttaagggcaaggggcatacatctttgccagacatagactgaaatctacagtttctacagtgccacactataaagctctgcattctcagagtggagagacttttagaaaccaagtgatctgaactattaactgcccacccctggctttccagggtagaaaattcatggtaggaataactgttcagagagagtacttggaactgtangttaacaagaaggcctgcgt

SEQ ID NO: 4188 - DNA, 387 bp, Bos taurus
  unsure (21): Clone ID: 59-LIB3058-034-Q1-K1-G4
ggattcccggctcgagcgagncgattaaaaggacaggtgagtattttacttaagttgtgggtgagtaaggagatagaagctgctattcaactcacagtcccaagtattagtgctctgtgtaaaatgcacttttattatcttcttgacacaggttgaaagtgctatcagagtaatttatcatgattataaaatgtttctaagattgtgaagtgtaccagtggcacagcctgtccctacctgttacctgaaaacctagttccaagaaatgactcacggttattatctgctagaagggcaagcaaaagttgaatatgacatctttatttcattggaggcataacaatctcatgacacttaatgacggtcattaaatttttcaagctattg

SEQ ID NO: 4189 - DNA, 449 bp, Bos taurus
  Clone ID: 59-LIB3058-036-Q1-K1-G12
gacccacgcgtccggggaatctcaatgtatgtaacattgcgtatcataatatacattgaatagttccccaatcagctagcattattgtttctgtcctttacgttaaatctcttcttttgatgaaagttaaatgtctcctgagaaataaagcagcagttaacacttagcacgaacttgcccaggtgatctgctctgcgcccctttgctttaatcttgacagcgaagtaggtctttattttccaaaggataaaactgcctcggttcaaggtcacacagccattagaactagagttggatgccaaacccacattagttcagtgccaaagctcacaacccatatatctatttttttttttaccattcttgagattgtaaaataaacagccaagtttaaagctcaagggcacaacttttttttcccccagaaataagtattactgagtaaattt

SEQ ID NO: 4190 - DNA, 399 bp, Bos taurus
  unsure (24),(47),(294),(308): unsure at all n locations; Clone ID: 59-LIB3058-037-Q1-K1-G4
tcggcgtcaaggaccacatcacanagcccttggccttggcccgcggncgcgtggcccacgtcatcgagtggaagggctggagcgtgcagcgggcgggctgggagctgcccccggccgccgccgaggagcattactgcctcctcccggatgagcttcgggaggcccgctttgccgcaggggttgccgagcagtttgccatcacggaggccacactgagcgtctggtcctcgttggatgatggagagctgggcctggagagcggccccgtggacatcctgcagctccaggacctgnggagcgtctacctncaggacagccttctgagtgtccgctcgcaggatgacagtcttctggccttctcctcccccgacggctggcccttccctgacgagcccccca

SEQ ID NO: 4191 - DNA, 385 bp, Bos taurus
  unsure (20),(33)...(34),(366): unsure at all n locations; Clone ID: 59-LIB3058-049-Q1-K1-G4
ccacgcgtccgggggccgcnccttttttttaanncatttaataaaaaagggcaactttaatggttatcacacaaatgttaatttacagttatctgaaaattataagagaacaatttgtgcatgtcacattcatgttactatccatataagaacaactacacataatcatttattcaactacatcaggataacacacaaggttttgtttgctctagacttctcagttaaaaagaaacaccaaataaggaaactgaatttccaaaaattaagttattaacaaaataaataataaaaattatttctaaatgtcttatattttgacaactttgagttatacttacatactattatttctccaaaccaaanattacaacaagggtcactg

SEQ ID NO: 4192 - DNA, 398 bp, Bos taurus
  Clone ID: 59-LIB3058-051-Q1-K1-G12
gtgtcaccttgcttactgtggcctgcatacctcagagatggtggaattttacatgtgctcggcaatgacagtagttcaaccattgtgcagcagagatcatcattagttcaaccttccacatcagatactgcaaatgtacagcttgaacagtttgctacccctatggatgtatgtccgggagagccaacttcatctaatgacatacccgatgcagtaactgttcctacttcaaatggaaatgaaatgcatggtgctggaggccagtctaactcaagactgcaaggcagcagctctactagtaatcttgagagggccttcaggatccgatttacaccgtgctatgccactaaatatgctcctcactggcggattagatgttcaaatgttcctaagaaatg

SEQ ID NO: 4193 - DNA, 424 bp, Bos taurus
  Clone ID: 59-LIB3058-051-Q1-K1-G4
gtccccgagagacgtggccaaggtgggttccatgcccgcatgaccctctcagcacacgttcaacccggagacacctcagacccgagcagcgccctcagggggcagctccatctccactcaccccccttccagcagccccacccctcaaggggccatgaatgaggctcttggagaaacaggagcctgcatcctgccccagccctgccgcgcgggagctgggtgacctgtcagctggagggaactttgtcaggctcagttgggtcgtttctggcgtgggcacgggaccaccggagcacagacgatgtcggaagagcatccgggagccggcatggtggatgctggcggtccactgggccccagaagcttcaagagctgagtcacagttggttacagccacagtcaatgtcatggcagctcataactg

SEQ ID NO: 4194 - DNA, 409 bp, Bos taurus
  Clone ID: 59-LIB3058-052-Q1-K1-G12
cgcgcccggggctgcccccagcctcggctccgtgtggagaacgtgactcgcccccgagtgtgcagcaggcctgggagtgggcctggtgttagggcagggtcactccgaacagggaacgggcccgccttcccccggggctccgctcacctgtgtgtctcctgtctgctctcgtcctgctcctcagccgctttgcggagcctctgtcccgtctccggaagggagcccagctgccccacctgtccgtgggtcacgctcgcacctcctgtcctcctgtcctgtgtcgatctctcaggtcctccaagtcagctaggaccttttctgggtcatgaatagcacaagtgagacaagtgtctcctctccttgtccccggggtatgtgatctctggcaataaggcgtctcgtgggtgat

SEQ ID NO: 4195 - DNA, 178 bp, Bos taurus
  Clone ID: 59-LIB3058-053-Q1-K1-G12
ccaggaaccgacctccatgactgggagatcgaaacaacagcgggaagctgatgtacacggcacgaagacacattgctctcacaacacggggacaaagggcattagacacataagacgcagagatataacgacgcacaggcaggcctgactcacatagaaggtaacgaaaacgcctgct

SEQ ID NO: 4196 - DNA, 208 bp, Bos taurus
  Clone ID: 59-LIB3058-053-Q1-K1-G4
cggacgcgtgggctagttctagatcgtgagcggacgccctttttttttattgatttaaggttttttttatttattttttttattttttactattatttaattattgaagcttaatacgttaacctgtaactaatgtcgtatgcaacacggaatattatttgcactaaataggagattgcattttatgcaacaacaagggagagcactc

SEQ ID NO: 4197 - DNA, 445 bp, Bos taurus
  unsure (320),(398),(413): unsure at all n locations; Clone ID: 59-LIB3058-054-Q1-K1-G4
cggacgcgtgggctgcgggtcaactgtgatccaggctagaccaaatcagagctttgggattagcttaacaaagctgccggacagacagacacaggagcccacatgctcctttcacacccccatgtgcttttttgaagtcagattctaaattgcatttgaatttgtgcctctctgtttcccttgagccaaatccctcacctcatagttccctttggctcctgcagaattctgaggaataccaggtttcccccatccttttccataaaacatatttatgtatccatactaaagagtactttctgaggagtacttcatagttnttttttttaattgccttgtttgccttcagtttccttaattttcatggtttacatggatgtgtgtgtaggggctatatntgtgtatatacacgntgggttggggtttttgcatgtgtgggttccat

SEQ ID NO: 4198 - DNA, 441 bp, Bos taurus
  Clone ID: 59-LIB3058-057-Q1-K1-G4
gtgccggtccggaatcggaagggtcgactcgagcgacgcgtccagagatgtgctcatgcctgcaggttactcttagggccagagctttatcagccggcaggaacgaagaggctcccactttctgtacatttagaatgagcaagaggcaggcagatgaagaaaaaggtcttgggtgagggcataaatataagccaaagcattgaggcatgaatcaacatgacctagtcatgaagtattttagcatcagtggaggttgagggccagacaagaggagtggaaagaagaggcaggtgagaaaggcagggccaggtcttcccttgtctggacaaagaataggggctcgggtgaaggattagaaacttaggaacttacacaatcagacttgtatattggattgagctctgtggaaggcgaactagatcagtgcatccataaggtaat

SEQ ID NO: 4199 - DNA, 443 bp, Bos taurus
  Clone ID: 60-LIB3058-004-Q1-K1-G8
cttttcttttctttaagttttaaaaaactggaataattacttctatctttttttttttttttgctgtttatatttaggggtttttgttgataaatcaagtcttggttgtggcttgctgaattaaatatttatgagtggtgcatttttaagtatagtaaacaagacaccatattaagtacagtgataaagcatctatattctgtaaaaaaaaaaaaaatctgcctatgcatgttttttaagaaacaaaatggctgtatcggcctgtatgagactgtaatgcgcttagtggtctgacatatactggaaatgtatgtatactggcgtactttatattctctaaaatgcttcatgcctttgaaattttgtaatccaaaaaaagctttgaaaaaatctacaggggagagtattcttaaaagtttttaacataagcttgtcagtgcaca

SEQ ID NO: 4200 - DNA, 440 bp, Bos taurus
  Clone ID: 60-LIB3058-005-Q1-K1-G12
cccactcccaacaagaggctgtgcttttgttgttgtagttcccatagcgttctcccccggaggcagccaaggcccagaagctcgtctggcgtttctgggcgggctctctgtcttccacggagcccgcttggggagcagtgtcatccacggtcagtctccctctaggccctgcctcagcctatgacccctgatcttctcaccagggtggggctgagcagagcccttgggcctcgttgctcagctgcagccaaaaaagctgctgctggttcccaggggccacgtgacctccgcgtggccagtccaccgtcacccgcctgggctctggggccccatgtggtccgataggcatagagagagcagcttaggggggcccaggatggacattgaggctgaagtggaggcagccagatgtccagcccttctccccatgctggtcagga

SEQ ID NO: 4201 - DNA, 222 bp, Bos taurus
  Clone ID: 60-LIB3058-006-Q1-K1-G8
gggatgaggacggagattttggtgacttttggtccaggatctgacttacaaaacgttgggagataccatcaggcgattgtgaatcgagaacatgtcaactagatagaaacttgaattgaatgacgtagctgcaggctgaatagggaaaccagcggactgatggatgactgacgacaacatacgtacagactttatgcatcagaagcctgtagaactattgac

SEQ ID NO: 4202 - DNA, 388 bp, Bos taurus
  Clone ID: 60-LIB3058-007-Q1-K1-G8
gcggaacatcatttgcgagacaaggaggacttccggaataaagtggaggactacattagagcgctacgccagatgatacggggagaggactgcagggccgtggactgtgcgtgaaaagatgggctccacccgcaaccagaggagcctcttcccgatcctcggctgccctcagtcccgtcggctcgtccgggttctgtgaccgtgttgacctgaggaagaacctcttgacgaccgtccattgtagccggagagttccacataaatacagtcataaaatgtgtctgaggttctaaagagttgtctgcttcccttaacatgtttactgttttgaaactgtactgaataggctgttgatgagaatgaactcagcgtctaagctagagctgct

SEQ ID NO: 4203 - DNA, 64 bp, Bos taurus
  Clone ID: 60-LIB3058-009-Q1-K1-G8
gggagaagtagctctttttggctttgttttcattatagtttaataaacatgcatttgaacacct

SEQ ID NO: 4204 - DNA, 425 bp, Bos taurus
  Clone ID: 60-LIB3058-011-Q1-K1-G12
atggggggcaatcagttcttctattttcgatttcttgaaaaaaactttatttttccttgagaacacatatccatgttcttaattgccaatcatgtcatacggacggcaccatcagtgtggtccccagaagagggctggtttgtgacttgtccctctctggagggtcagccatgcagggcggggcccagaggggccagcgggccacctcagtagaagacactcttggcctttgtccttacgactgtgtaccaccgggagaaaccgcaggcttcttcaggagttaggcgggcgtgacggggacattctgcagctttggggtagatcataaaacacaatcgtgccagctcctcatccgatctgggctgctgcacacccttccccaagcactgttgggggacagtgacagccccgtccaaacttgcact

SEQ ID NO: 4205 - DNA, 441 bp, Bos taurus
  Clone ID: 60-LIB3058-012-Q1-K1-G12
gaaatattagcatcttagacataggataagtgaacaagatgccatagaggttccactgaccatatacttttatctgtttcctagctttgttgttgctgtttagttgttatgcagttcttgggttcaaagtagattatatctattcctaaagttgggtgagggtggtgtagctttcacacaaatgcacttaaatattcataatttttagtcatcacaccctgtgagatacagttgtgaagttgataagataatgaacttgacttcccaagtggaaagtgttactgctatttctagctatcctctgatttgctgtgtggccttacgtgtggttacttttttgtgctttaaaaaaaaattcttaaagtagaattatacatggcaactatccattttacagatagtgacaaaaatggtagaaaactagtaaatagcttcttcgca

SEQ ID NO: 4206 - DNA, 390 bp, Bos taurus
  unsure (82),(105): unsure at all n locations; Clone ID: 60-LIB3058-014-Q1-K1-G12
cactgcagtaccgtccggtatcccgttcgacccacgcgttcgctagttctagatcggagcggcactgccttttttttttttnttttttttttttaccttttaagnttcatgagacagtggagaccctgggcaggcaaagagagctgggctcggggaagcacgcagacaagaacaaaagatggagggtacgaacatggcgccacctggtcatgaaactgaaaaggtgagagaaaacgaggaaaaaagacacggcacttgatattcggcatcagatgcgggagctcctgggatgagtcgcggtttatattccgggggtacataggccaggcgcggctccggcttcgtgctctgtacaggcccctgtaccccctgctggtctgggcccttttc

SEQ ID NO: 4207 - DNA, 361 bp, Bos taurus
  Clone ID: 60-LIB3058-014-Q1-K1-G8
tagatacctgctttgcagctctgggatctcatacgtgcagctgagttgttgtgcgcggctgagccctcgtctgtgacaacaggaaaagatatcctaaaaactcgatcggatgattatatgttaaaatacataaagcacatggtcctgaagttgatttaccttgaatctagagaagcacaatgaagacgaggctgaacagacatttcagaacacatacacattttgccttgcatgatcactatgctatgagaacaagcatatggaggaggcgcagaattccctgaagacaacattcggtagacagactgggcagctttctgcaggaattacctgaatgcttatcttttgtgataccataact

SEQ ID NO: 4208 - DNA, 421 bp, Bos taurus
  Clone ID: 60-LIB3058-016-Q1-K1-G8
attgcagccccatagagctgatcggtggcacccggctccccacgcccagcacctgttcctgcagccctgcctcctctctctgctggaatcaagggggggcgcttctatcctggccaagggacccaaggccctggcccacccgcccacccccctgccccccagctgacatggaaaccccagccctctgggccccagccaggcagggtgagggggcatctctgccaatctacctcacgggcccacactctgccggccatgccatggatcatgggccgggaaggctctgggggcagaaacaccactccctggtcaccctctcaccccacactggcccacagcagccagagggtcccgggagaagagggggcagggaggagggcttggccccttcatggggaaggaaaccagcacgcctccattc

SEQ ID NO: 4209 - DNA, 455 bp, Bos taurus
  Clone ID: 60-LIB3058-019-Q1-K1-G8
atccgcatctgctctgacctctcgatgtctcctgtagtctctggtgagggtgggggtggccacagccttcagaatattaagcgttgaccctgggacctgggcaggaaggggaggcagttaaaaatgccagagcacgcacaccataggagcttcctgatcagttggtgcttggggctgggccctggcaggaccctgtagtttgatgccctggcctggctcacactggggttggtgccagagaaggaacaggtgaagctgggcagcgggcggtgtgatgggaggggcctggtggggctgtaggcctactcattggagccctgggcctaagagatgcggtgcccgtgaggccagcacggaagcgggctgcagccctccctgctactccctgccatcctgtgccccacggtgcccacttggtccctgagctcctctccgacctccctgcaggcgaacct

SEQ ID NO: 4210 - DNA, 460 bp, Bos taurus
  Clone ID: 60-LIB3058-022-Q1-K1-G12
ttctagatcgcgagcggccgccctttttttttttttttgccaagccaatgccaccccacctttatttactggtcttcaggttccagtcagacacttgaatctggagggcacaggaagaaaaaaaatggccctgaagaccctcccaactcaccacacagagcaggacccactgggtagcctcgtcagctcaggccagccccacgccccttcctaagggtgagccagacctggctgcctagaacccttggagggggcacccagcagtgtgccaggcctggagagctggtgtcatcctaaagctgacaaggaaggaaagggccaggctggacagtggggtggggggtcagacgctccccgtgccccgggcacagatgcagcaggggtcggtgagggacccatgctgggtgtggctgggaccaccctgtcctggctcctggccacttcaggacaaaaccagccc

SEQ ID NO: 4211 - DNA, 301 bp, Bos taurus
  Clone ID: 60-LIB3058-023-Q1-K1-G8
ctctcgcagcagctccagaattagtgcttgtttcttttaaaccagtgtagccaagccatgaattgcatctgcataggagacccaagaaggaggttggggtccgctcataaagagccttgaatgccaaaccaaagagcgactccctccaatcatgtttggaatgaagtcgagtataaaggaaaggaaaggaaattctaagacaattggattttgtcttatcagtgaccggaggcagggaagaacttttttggtgggatttactatggttgaccggcgggacttaaaggagagagccagcttt

SEQ ID NO: 4212 - DNA, 427 bp, Bos taurus
  Clone ID: 60-LIB3058-026-Q1-K1-G12
caaaatgctaaccacatggcgaattcctgttatataacgtgtatgttgtaagtcttacttttgaatcacctgaaacaaagtatccttaaaacactcaggaaaaaatactcaaagcatgaatgttattgcatttttaagtatagaaacaatatgtgcataattgctgaaaaattttgcaaatttattgagatgcttaaagaaatgcatgcttgtctttctcatttcttcaagctttaaagcttttatcagaaaaacctgttcatgatttatacttgagattatgaaagtttttccctttaatctgatttcttgcattcaaaaaggaaggcaaagtgaggcttttttcctgaactgtattgatcaaaaatgtattggagaaaacacttcattagagtttcccccaccaggattttccttccgcatagac

SEQ ID NO: 4213 - DNA, 54 bp, Bos taurus
  Clone ID: 60-LIB3058-028-Q1-K1-G12
gtttgtcaataaagctgtgaataatgttcgaaaaaaatataaaatactacacgg

SEQ ID NO: 4214 - DNA, 73 bp, Bos taurus
  Clone ID: 60-LIB3058-031-Q1-K1-G8
gttagactttcctttgagttgttggcttgctcacaagtcctacacaagccctggacgggtagcctcttaggcg

SEQ ID NO: 4215 - DNA, 70 bp, Bos taurus
  Clone ID: 60-LIB3058-032-Q1-K1-G12
cgcgtccggtggaagacgaggacttctaggccgttagcgcctcgggtctgggggcgggtgctcgggggag

SEQ ID NO: 4216 - DNA, 96 bp, Bos taurus
  Clone ID: 60-LIB3058-032-Q1-K1-G8
acccagcgtccgccgaaactgtgaggaacgtggaatggtttacggctacttgtgtcttaaggtttgggcggcttttttatatggtccgagggccca

SEQ ID NO: 4217 - DNA, 350 bp, Bos taurus
  Clone ID: 60-LIB3058-035-Q1-K1-G8
ggattcccggtcgaggccgacccacgcgtccgatggcgagcggccggcctgttttccttttttgttgagttttctatcaggggtggagctggtggcatcttaactgatataaatgggtcagacgtaagggttcacgcgcagcagcaggggctggagcaggagggaactggcagcaggggcgcgattacggggatcacagctgttccctttttggacaactgcagccacaggtgcggccgggctagctcgcccgaagggttgttactcacaggctataactgccgggctgtaggccgcgcgctctctgccaacttctgtgccgactgcttctcttcctgaaaccaggctgt

SEQ ID NO: 4218 - DNA, 413 bp, Bos taurus
  Clone ID: 60-LIB3058-038-Q1-K1-G12
gggaattctctggagaaaagatcattattctagagctctggggaatagagctcaaaggcaaagaaaatgctagttaatagtacattgttaatgttaaattgttacttgaaaagtttctacaatgcttaaaactgctaagtgtggggaaggaaaaaagcaaaattgttttgctttgctacaagaaggggaagactgaaaagttaactgaaacctggatatcagtctcttgaaagattgttagggacttgcatcagcagattaacatctttcactcctttgcaagcttcttaagtggtttatctgaaggtgtgcaatgttcatggactagtttcagaaaagactttcagtaccctaattgtgggctgttaaagtattttaagatttggtacaggcttagatgccctcttctgggt

SEQ ID NO: 4219 - DNA, 452 bp, Bos taurus
  Clone ID: 60-LIB3058-038-Q1-K1-G8
gccgacccacgcgtccgggggcggtcccgctcggggctcgtgtgcgtttagacgagggccggagcctggcggcggcccgaggcccgagatggtgatctgctgcgcggccgcgaactgctccaaccggcaaggcaagggggagaagcgcgccgtctctttccacagattccccctaaaggactcaaagcgtctgatgcagtggttgaaggctgttcagagggataactggacccccactaagtactctttcctctgcagtgagcacttcaccaaagacagcttctccaagagactggaggaccagcaccgcctgctcaagcccacggccgtgccgtccatcttccacctggcggagaagaaaaggagggctggaggccatggccgcccccggagaagggacaccgggaaggcctcggcgggtctgaaggcacaggcgagtgaccctgtggacg

SEQ ID NO: 4220 - DNA, 197 bp, Bos taurus
  Clone ID: 60-LIB3058-044-Q1-K1-G8
cggcacgaccgacgcgacccatgcgtccgtcccatcataaaggggtatttatgagttttctgtctccttcagaatatctggagagtgctcagttctaactgacttccaagagaactgaactgaggcactctgattgttattacaattggcagctctcactgggatactatcacttggaagggtgctgaacatctgag

SEQ ID NO: 4221 - DNA, 286 bp, Bos taurus
  Clone ID: 60-LIB3058-045-Q1-K1-G8
gtgattgtatcctactaattgagcaactttctcaggagaatgagcccatctgattcagctttggaacacagtctcagagacatcaaaggaaaaataaaagagacaagctggcacatggctctgtagtaggcttttcccctattgcattgtccatatcagagatctaaattttcaaatataaaagtgtatgttgtcttgaagattctgaaccaaatcaaaactacaaatccccctgccctggtctgggctttattgaagccaaaaacatactgagcctctgtctgtg

SEQ ID NO: 4222 - DNA, 432 bp, Bos taurus
  Clone ID: 60-LIB3058-046-Q1-K1-G12
cggacgcgtgggcgtacgcgtgggaatttagtttagcagacaagagaaaatggataaaagacatgagtagttgacagttatgactgatggagagaaggtgtctctcattcacaataatccaggatttggaatgaaatgaaggtcaacagaggaagaactccaagtcagtgtcagcctgttggcagctggagcgccactgtcgccaagggagacaactaggcactcactgtcccttctccattggtgacgtttccagggatcaggtgggagttgaaatgacaagagaaagggttttgtaaataaggccacaggaattatcacactgctcagtgttctggatcatctgactcatcgccacctctgacaatggcatccaggcctattctgtggaagggtctcattttcttctgtattgcaacttccaaagtttca

SEQ ID NO: 4223 - DNA, 359 bp, Bos taurus
  Clone ID: 60-LIB3058-047-Q1-K1-G12
agaaaagcctcctaataaaagctttatgttgatagtcgcggattcacagtctaggtaaggaaccattggatctggggagcctggagttgctacaatgaagacttggttcgataaaccaaatggtaatagagcatacagtccaggttttcagagaaaggttcaattaggaaatgaaaataccaatcttgaacttataaaagttactacagaattaactaatatcaggaaactcaatgagcatagtagtcgatgtggaaccttggctaacttgcaggttgactatgatggggatcctgaaaggtgcctgatccaatttggcacattcggagtatcaattcatgctatatcaagttccaaat

SEQ ID NO: 4224 - DNA, 414 bp, Bos taurus
  Clone ID: 60-LIB3058-052-Q1-K1-G8
gtttctgtggagaaagaaaccctgcctagcctggagtgttgggtgtttttgtctgtgttgccatcccaggcctgcgataggggcttgtggctacattgtaatgtctgggccatgtctggggagtccttcccacctgcccagccagggactagccatccccttgaagaggcctccttttcctccctatgatgcaaggcacagggagcaccacctcccatgacaccaccttcaggagttccaatggcacgtgcatccatgagcctccccctgggctacctgcccgaggcccacctctacccacagtcctgtacaggagtcgagtaaacaggatgtctctgagcccttgtccccaaagggccggccaagggctgcccgccaacctggctccatcagtcctgcatgatcaagtgatag

SEQ ID NO: 4225 - DNA, 357 bp, Bos taurus
  Clone ID: 60-LIB3058-053-Q1-K1-G8
ctagatcgcgagcggacgccctgtcttttctcttttttttatggtctttttttttaggtgtggtattttatttttttttgactttcttccttagtgccattcctgaatagaaggcaaagtactgagctttctaccaaagtgatgagaactctaaagacagacgagcccgcccatccgagtagccctggcagctgactgcccagcagtgtggaagcagagtactgcgtctctaagagtctgtactgaagggacagcacaagttatcatttctactaccctcttgccctgttacaggacacagtcactattaatgactttgagagaaataagatattgtatacagagcacatgtttcac

SEQ ID NO: 4226 - DNA, 414 bp, Bos taurus
  Clone ID: 60-LIB3058-054-Q1-K1-G8
ctctcctctgaagtcccttgtttcctcttctgatttctagtttgagttctggaggggttatctcctccaccccttgccctgtaattttcagcctgggccttggtcatacttctcagaatccaccgatccaagccctcctcttcataggacagttcatgaagacactggggattgagaagctcttctgaggctaagttccgaaagcatggggagggggaggctagcactccactcagccttaaacgatgttgagggggccagtcagggcccctcaaagcagagtatgctgcagaggcccctgttctgggtcctgagagggtgacctgctgggctggcagcagagccagggctgaggcccctccgttccacttacactgaagcacgaggagcctggggacacctgaatggatcttg

SEQ ID NO: 4227 - DNA, 379 bp, Bos taurus
  Clone ID: 60-LIB3058-056-Q1-K1-G12
ctagatcgcgagcggccgccctttttttaacgtgacttttttttttgtgttttttttgttacagactacagcccccagacttgcgaattttattgctaacaattccaaaacaaaggttactctgctcgtgaggtccaaggttccaggaccggtcatatacagcaccttccagacccactgtggcacaaccctgagacacttattggatggaacctacttgctcaaatggacttggtgacacagcatgcaaacacctggacaactgtcacgggcatgtgcttaagcacacttgagcccattcatgcccacactggggtacaaactgctcaactgggacacgtgagggccctgtgtgcactcctggtatgggacaggggag

SEQ ID NO: 4228 - DNA, 451 bp, Bos taurus
  unsure (430): Clone ID: 60-LIB3058-057-Q1-K1-G8
aagatgtgctcatgcctgcaggtcactcggagggccagagctttatcagccggcaggaaccaggaggctcccactttctgtacattttgaatgagcaagaggcaggcagatgaagaaaaaggtcttgggtgagggcataaatataagccaaagcattgaggcatgaagcaacatgacctagtcatgaagtattttagcatcagtggaggttgagggccagacaagaggagtggaaagaagaggcaggtgagaaaggcagggccaggtcttcccttgtctggtcaaagaataggggctcgggtgaaggattagaaacaaaggaacttacacaatcagacttgtatattggattgagctctgtggaaggtgaactagagcagagcatccaggtgggaatgtgttgtacagtgtaaggctgaagggaggcgtncctcagccagttcagaacagt

SEQ ID NO: 4229 - DNA, 437 bp, Bos taurus
  unsure (335): Clone ID: 61-LIB3058-003-Q1-K1-H2
ggaagccagagttcacatggttcagagacagaccaagcagcacatccagctgtattaccaacagagggaaggccaaagactacatccggacaggcccaaggtgcagagacttgtactctgggttgcaggaagaaaactcatgtgtcagagaacagacactgtccaagacctgcttcaaaggctgagattcttacctgatctgagtcaagtgtcacacgaagtcccagttttgtcattccatcttccttcagaagcttcaggtggggacacagagcaagacaaaaggccttggcaacatgctccgttagtcggctgtgatctgcaggatcactcangcagttgtgctggtcatcattctctaggaaaaacacctgttgcccagaccaaagagacttttaagcttgtgtacagggtctgtgggatgaaatgagtgcacc

SEQ ID NO: 4230 - DNA, 384 bp, Bos taurus
  Clone ID: 61-LIB3058-004-Q1-K1-H10
cggacgcgtggggacttgtgttccatctattgtcccacaggttatcaattatttcttgaatggttttggtctgcatgacttgtattaaatgcttccataggggttcccatcatttgtaaaatacttgaaagcaagagaatttgtttaaaactcttatgggttggaatagatttaacttcaggaccacccattatagcctactttcatcaccagcaaggcaggtttataaagcttatgaagcagttaggactcatcttaatacaacccagaggcccaatgaaagcaaaagggaaagggctcagtaggaaaacaacctctggtatgctagttctaaatattatggcttgtaataggcatcttttaaagactaatacttagagaact

SEQ ID NO: 4231 - DNA, 446 bp, Bos taurus
  Clone ID: 61-LIB3058-004-Q1-K1-H2
actagttctagatcgcgagtggccgccctttttttttttttttttttttttttttttttggttttttttttttttttttttccccctgggtttacattttgaggcaaaatagtctatttgcagctacatggggggctatgtgaggaaaaaaatctgggctattaaaaggggaaagttttttatgtaaattttgaaaggaaagtgtgtcaagagcatgattttaaaattaattggggcttcattttaagactttttaaaaaaacccagttatttcactggatttgctagcttcaaagaagagatccgaatttgtgaccagcgctaaaggttcagtgttagtattgcttgggctggccgttgggccatattcttgttggaaataaaccgtagcatcaaagcccattcttccttgtcagtcttgacccaaagatgtcaccattcctagt

SEQ ID NO: 4232 - DNA, 381 bp, Bos taurus
  Clone ID: 61-LIB3058-005-Q1-K1-H2
tattaagaactagagccttacgtcggaacgggggcccgtcaccagcgttggccgaggatgtcggagccgtgtccggcgaaggcggcactgctggagtgtgaacgcgctgaacctttaccagatcagtttggtttcattcaatttgttgactagctgaaatctgaatatagatagtttactttatgaaattttaatgatggtcttacgtttaagtgttccgtgctgaaccacagtgtaaaacaaggctgactgacaggagctttatttatgttttacttgcatgcaagtttttttacacatatttgtggtgggtaaacttgaacatacgcatgaataaaccattggttgctactttaaaagggcaagtttttgatcatttca

SEQ ID NO: 4233 - DNA, 373 bp, Bos taurus
  unsure (311): Clone ID: 61-LIB3058-006-Q1-K1-H10
aagtccttatgtggtttattatggacaatatagaaacaatttataaaatgattttaaaggccaatttcatttttattcctgctctcataaagcttttgttctatgaactgttagacaatttgttttcatttgatagcccagtttatgtttgtatctaaaataagaacatattgtataccatgatataatgcacagttttcttaaattttaataaattagcatttttaaggtctgtacagattgttactgttctgtctacagctgaagttggtaaagtttttctaaaagcctatagactttatgaagacctnctatgtcagaaaattataggttagtatcttacaaacttattgccctgagaaaatacgttctg

SEQ ID NO: 4234 - DNA, 344 bp, Bos taurus
  Clone ID: 61-LIB3058-006-Q1-K1-H2
ctttccagttgtctggttaaaggctaaagatattcataggccagggaagagggaatgagtttggaattatacagatacagtctgtatagtaataacccagaacttaaaaattttcagttttacaatggtgcaaaagcaatatgcattcaggagaaatgtccagttttgaatgttgaccttttcccaggctagtgatgtgcagtatgatgctctctcttttttttattttttgccacattgtgcaaaaatggagatcaaacccacgcctgtgccctcaagaagcccagaatcttagccactggaccaccagggaagtcctacagtgctttcctgagatgctgggc

SEQ ID NO: 4235 - DNA, 121 bp, Bos taurus
  Clone ID: 61-LIB3058-009-Q1-K1-H2
ctagatcaccagcagccgcccttctttttttttttttttttttttttttttcttttttgtggactttatttttatgggaatagattatttttttatttattatactaatctcttaactttt

SEQ ID NO: 4236 - DNA, 398 bp, Bos taurus
  Clone ID: 61-LIB3058-010-Q1-K1-H10
cttatgcacagactgagtgaaagaagatgctgtgcatatttgctgatctgcatcagcatcttactaaaaatgtgaaatgaacggactatcgtacactgaaatgcttaaatgattatgaaagcacatggagatactcatttttgatggtctttccatttgagctggagttgacctctttgacacctgtaatcagtattcgaagggcgagaagtgaatgtaacaagtataaacgtccttaaaacttataactctgctataatcaccgtagttcagagcagtgtcagattcattctaatggccaacagtggatgcttaaaaaagaatatgatgatacaaccatgggaaagatatctttatagagcatatcactgcaggcagtcttgcactcatatattact

SEQ ID NO: 4237 - DNA, 285 bp, Bos taurus
  Clone ID: 61-LIB3058-013-Q1-K1-H2
gggacaatttcgaagaaaggggggataggggtagatgccttgggcaaatgggcaccccccacccccagtctcctcgctttgaggatccttttgccaaatgtgttgaattcgggggaactggtgtgcccgttctcccttcgccatatctcaaggccccccaatccaggatctggagaaatcccaccctggggtttctgtctcctgtgcctgcctgccccctccccgattctgttcacacacccctacgtgtaactgcattccaaccactaataaagtgcctattgt

SEQ ID NO: 4238 - DNA, 361 bp, Bos taurus
  Clone ID: 61-LIB3058-015-Q1-K1-H2
ttctagatcgcgagcggccgcccttttttatatattttttttttttttttttttttatatatggttttttaatttttttttattgttttttattttatttatctttgatttttacatattacccactccttgcccaaaagcatttagatgagaatcagaaggatgttcaaggaaccgaatgaaaggtcagccatgtcacccattccctgcccctgtgctgagctccagccagccccatcaacagccccaccggctcctggttggaatgaaaaggggctctggttgcactgaatgcaactctcaaacttggtcttgtacttgctgaataaatactgaagtactggcttaaaaaaaaaaatat

SEQ ID NO: 4239 - DNA, 433 bp, Bos taurus
  Clone ID: 61-LIB3058-019-Q1-K1-H10
ctagatcgcgagcggccgtccttttttttccatttttacccttttataggtctctttatgtgtttccttatccatttttttgttttttcactttttttccccttaaaaatcccttcattttctaaaatttcacgccaaacctactaaaaacccacatgctctaaccccaatctttcctcatttctctcttataactttttattgccttttttgaaaccctttgacactttagggaactttaaaccacctttaaacttcctttattcctttttaatccggggaaactttggaaagcaaaacccgtttttaaaaacccaaatcaaagggtccccctaaaacctaaacttactgttttgccccatttaaaatcaaccccaaactcccccccaaaagcccttaggttttaaaaggcccaaaccctttaaccttttgt

SEQ ID NO: 4240 - DNA, 385 bp, Bos taurus
  Clone ID: 61-LIB3058-019-Q1-K1-H2
atttcatggaaacttacctgtgaatagcttcttcagctaagctttaatgctggcaggtagtactgcttttgccttggacagagtgcataacacgaatgggaggacgagatcgtgcgaactgtagcggctcttagtatctattgatatgatgcttgtgaagcgtgaactattttattcactgacacattgtgttctgcacaatactgagggcaaaactttagcatttaggatccatactctatgagtcggacgatgctgtacctactaggctagagcggatcagaacacagtgatagtgacctttgcaggattagcatcttgaatagtaatctcttaactgtcattatgagagacttgacttcattctattagatccgaacaagca

SEQ ID NO: 4241 - DNA, 318 bp, Bos taurus
  Clone ID: 61-LIB3058-020-Q1-K1-H2
atctgtaagaccttttattccacaacatctttttgaaaggtctgcattttccctggtggtatatagtgctgtcacacagaaagtaccatacctggatctgtttcttggctccatatatacttttcgttaatttgtgtgatcctatgctagcagctctgctaattattctgtgctaaatcttgatctctagtaaggcagattcatgtttcattctttttacttcttgttctcctatctatacattttcaaaccaattttatgacgtttaaaaccccagttaggggacttccctggtagtcgagtggttagggacctcca

SEQ ID NO: 4242 - DNA, 207 bp, Bos taurus
  Clone ID: 61-LIB3058-028-Q1-K1-H2
cccgggtggacccgcgcatccgcggacgcgtgggctggacagtggcccaccctcgtctcaggtctctgccaggtctgaggctgcggctatagtgcggggtgccatgtaacccactggctgctgcattaacccaggaatacccaacttgtgtatctgtgtgtttagctgggaactcacccgctataatgaactgaataaagtgtttat

SEQ ID NO: 4243 - DNA, 426 bp, Bos taurus
  Clone ID: 61-LIB3058-034-Q1-K1-H2
gacccacgcgtccgagtgacactaacaaataactagatcatgtatcttccactataaagtatactgcctcaaggagttactgaaaatggtatgcgtgttgtactatagggaaacagggaaaaactattctatttatggctctgaggtcctaaataaatctctgtctctgtcaagtaggtgtttggaattggagggttaaggtattataaggactggtgtaagttttttacttccattcttagtcctcagttcctggttttagaagatacagtggaagtttggatagcaacttagatggataaatctaaactgtgtttagcccaaacagtcctgcctatgtaagtagaaattcttgtgcataggaatgggtgcttccctgagatcttcagtttgggctcagtttagatacaaaaaataccatgtatc

SEQ ID NO: 4244 - DNA, 144 bp, Bos taurus
  Clone ID: 61-LIB3058-036-Q1-K1-H2
gggaggcgagacagcgttgcggtgccgaggcagacgctgagccagtccctccagaaccccgtcccagttttaatacaactgctcgacgttaccttgctaaattccaagtgcagaggcatcccccaccctgccacatgcgcgtct

SEQ ID NO: 4245 - DNA, 429 bp, Bos taurus
  Clone ID: 61-LIB3058-038-Q1-K1-H2
gacccacgcgtccgccaggctcttctttccatgtgtccaggttcacttctggcagtgtccagtgactcactggggtaccgcattgcagaagaagaaaggggcaagatgtgggcaaaccgtttcccttcagggacatgaccacaaggttatacatggcatttctgctcacgctcttatcggccacaacttggcatcttagctgcaaagaaaactgagaagtcagcccttagcctgagtagccacaagcccagataaatcctaataatttgggaaaagaagagaaattgggggacaaccagggaacctctgccacaagggtacgtgcctctgttaaaacgctctcctggtacttactgcctcactggtacagacggagatatggccctgagaaaactggaacatgtacaacaaagtgtgagaaaactgaat

SEQ ID NO: 4246 - DNA, 398 bp, Bos taurus
  Clone ID: 61-LIB3058-040-Q1-K1-H2
ggttcggaatacccgacccacgcgtccggagcctgcgagcgaactggttgccggttgcgtctgggagcttggttgcgcaattccttgccgccactgcggccgcggccaaagccacctgggcaaggagagaatttgccgcgaggttcccgcctcggaaagaggcatccctcactgctggccaagtgccagagaagcggtgcacgcacctctcagctaatacctgaccatgggcaactcctgcttcggcctcaaggaacggctgatgaagcggctgcggcctctgccgaccgtgatcgtcatccgcacctgcctgccccagagaaggagcagagatttccgcgtggtggtgctcggctcggacggcgtgggcaagagcgctctggtgcaaaggtgggtgc

SEQ ID NO: 4247 - DNA, 430 bp, Bos taurus
  Clone ID: 61-LIB3058-042-Q1-K1-H2
agctggggaagttttcatcatccgtcttaagtgaaagtgggaggagaaagatgggaggatagtgaattaaaaaagagccagaaaagatgaatttctggtccaagaattcctgcttttttcccccctcgttatcttgaggtttttgtgaatgttcataaataagtacctttactaaaagatttcacaaggaagattaatgcaacaagttctttgaaaactccaggaaatatgaaacagtaaaaggatttctctcctcgcccttataactgggtatgtgcttccctggcaggtggccacatcctgccagagcacaccctccttgaaactgtcttgttggagcttatgtgtcttcagttatttgctggacattgtcagaggagccagaagaaatgaaaaaagaaccccttccaagtcactggaagccccccag

SEQ ID NO: 4248 - DNA, 335 bp, Bos taurus
  Clone ID: 61-LIB3058-044-Q1-K1-H2
ctgactagtgtgactcagaagacggttctaatgcagtcatcatgttagtggcctgtgagcaaggcatactgctcttgagcatttcaaagaaaggtcaacagagcctccattcttggatctgcaacttggtctctgtaagaggtcttctttaaatccaggacccaggataggaaaagggtttccctgacagtttacaggaaacctgcaggaaggcgacttctgaagaaggcaggtgtgagtggcaggtttgtgaagcgtgggtttgtggactgcatgcttgcacgtaagctagctggatgtctttggggcgctcctcacagtgtccacgcaacccc

SEQ ID NO: 4249 - DNA, 357 bp, Bos taurus
  unsure (26): Clone ID: 61-LIB3058-045-Q1-K1-H2
gtgctagatcgcgagcggccgccctnctttttattcaatatatccctatctatttagggttttaacaaaattttcttatatctttttttatttttaacatatacaaacttacacatagctctacagcaccactaccccccaattgcaatccccacaacacacatctaaatcctcacatataagactgcatacccccgtcaacatacacaaccataccaaaaccacaaaaccgcctgccctggtctaaaccggatgcaaaccaattacatactaaaccattacccactgaatctgataacctattctacgaacagtacaacaatctgtgtactccacagcgaacttacacatgataaa

SEQ ID NO: 4250 - DNA, 440 bp, Bos taurus
  Clone ID: 61-LIB3058-047-Q1-K1-H2
tcgggagcagcttgcatgtctttggtaatgtttcctcattaaaaaaggtcttagcgataagttcagagacagaaaggagaatattttaatgtgggatctttgtttatggctgattttaatgttatccatgcttttctgtcttgatagaataataggttagcaatgggaaaggcttatgaagcttaattgtcgtgtaatgcaaagtttccaccttggcatttccttcatgaaatttgttagaaaatgagctaaaaataagataccctattttgaagaactgatcagtgaatgccagtcttcgagagagttttccaaaagcatttgtgtgtggtactactgcataggagtggcctaattcaaatgcttaatacctgaggtgaaacttgccctctgtagtcagaactggtttcaggtgttttcactctaaatcttcagaaaaa

SEQ ID NO: 4251 - DNA, 426 bp, Bos taurus
  Clone ID: 61-LIB3058-051-Q1-K1-H2
gttctagatcgcgagcggccgctcgcgatctatgcggtatcgctgagtgaagaactgggaggaggtgcacgaagtggatccttgagggtcggtacaggacactgtatatacctgtgggcctgtgtaaaactacaattttttactaaacatattgccccataactatacaaaggcgttagtggaagaaaaaataaaaggaaaaataaattccaactgggagctcaaacagagaaaactggcagaggatttttaaaaaaactttgtctatattctacattttattattatcttttattaagcatctatgtttcaccctgagtgttctgaactctttcgtttctttggtgttcccctggatagaggctagggtttcctcttctttcagatattggtgctaagacgattctgaccaaataattgatggga

SEQ ID NO: 4252 - DNA, 427 bp, Bos taurus
  Clone ID: 61-LIB3058-053-Q1-K1-H10
gaggtacgatcacgcgatgccctgcgccttctgctctaaccagtgcattgtcctgggctgctgatcctgaggtgggactgttatccccagagggctcctgtagggctgtcagaggaactgccagggaacctgaaagaggaagcagcctgttggtccaggatttgatactgaggttcctggttttggttcacttaacctctctgaacctcagcttctttttgtacaaaatgaaagaatgatcttttgggtccgctttggctcaagtctctgtgggtcagctttggaaagaattttaaggaagagctattttaaccaaacctatttttgcagataaaaattttccagcattgagagattttgatcaattcaagtttgcccatgtggataatgatagaattaagtttcaaatcatttcaccctggtttct

SEQ ID NO: 4253 - DNA, 378 bp, Bos taurus
  Clone ID: 61-LIB3058-057-Q1-K1-H10
gttattttacttcagaagttgcatttacctaaaggtaccggcaagttgtcatgcaatttgagtctcaatttaaggttttgtaaaatgaagagagtacagtcccatgaagaaagaaaatgcaaaagttaagaaaatgaataaggcaaatgatacgggaagtcataaactaccttttctttggtagaccttaaaactcagcggcatccactggaacctgcctcccagcatattcttcttagcacattcaactaaccctggctctcatacctcacagaaaggacaatacacgcctaacctaccctagaaaatctgcacgctgttattgcaaagcaagaaattgtgttgccaacaacaagaaaaaggacagttacagagaaa

SEQ ID NO: 4254 - DNA, 331 bp, Bos taurus
  Clone ID: 61-LIB3058-057-Q1-K1-H2
ggccgggccgtgtgggcccgctgcggggccggggcctgccgggagcctgcccgcagctcatcacagcgcgaggagcagaggaagacagcgggtagtgctggccggccgcggcagggcgaggcagcctgggtggtcgggttggtggcttcgggtgcggacagttccgagcgtcggcgccgcatcaggcccggcgactccttgataaaggtcagctgccgccggaaacccgagcggtcggaggattcgctgccgctggagcgggcggaggccacgcgcaccaggcccaggcgtctcactgcacctttaataaacagctgttgaatcgcgctcc

SEQ ID NO: 4255 - DNA, 89 bp, Bos taurus
  Clone ID: 62-LIB3058-001-Q1-K1-H10
gcgagcggccgcccttttttttttttttttttttttaacttttttttttttttattttttttttatttttaatttttgtgaattttttt

SEQ ID NO: 4256 - DNA, 389 bp, Bos taurus
  Clone ID: 62-LIB3058-001-Q1-K1-H6
gccgcccccatcttaaaagccatcttttactcccacctcgccgtcgcccaaccctgctgtcccgtgcggcgcgagggcaggcgcgcgccaccgccggaatccggggtcgcgactggcgttccacgccgcgcgccactcgcttcaggtgacatcatccccatgccgggctccgccttccgccccagccgcctcacgccgcatgcctattggccgacccgccttagccccgcctcccgctctccgcccgcgcgacccctcccaggcagcgcgggggcggggtttaaccgccggccggcgccgacaccgtcttccattggccattcggcgccgtctgtcaatctcctggtaaaggggccacgaacggcccaacgctggttgcccgggggagg

SEQ ID NO: 4257 - DNA, 222 bp, Bos taurus
  Clone ID: 62-LIB3058-004-Q1-K1-H6
tgttaacctaaaataagaaaggtgggaatttcacccgttactaatggtttcaagcctacgtcataacctatatgactctctgaataaacatatacaaacaaaaaattaatacttagaactacataattaaaatatatacaaaacataatatataaaatttaaaaggtggaactttttatatgatccaatttaaaagacacatgctttcaaagcaatattttt

SEQ ID NO: 4258 - DNA, 368 bp, Bos taurus
  Clone ID: 62-LIB3058-005-Q1-K1-H10
tctagatcgcgagcggccgcccttttttttttttttttgaatttcacttcactgtattaaatagaggttgtaatccacaatcttggaacctggaagatcagaaagatgaagtactaaaatctgctcacagatccctttcagggtctcgggagggaccttgacttatctgttcaggcaaggcaatattctttcataaagcattttctaaagaaggacaattcacaaccctccccagccccgtctcgcccggaactggacacggacacacgcacttattctcctttgcgatgtccgatgcagttgtgtgccttgttcttcattttgaaagcagatgcgtcaaacgttcatgttgctctggatgacaaccc

SEQ ID NO: 4259 - DNA, 430 bp, Bos taurus
  Clone ID: 62-LIB3058-006-Q1-K1-H6
cataattactgtgcgagtacaaaaaaaaaaaatcaaaacctgtagccagtggtcatatcaaaatctttttatgttcagatactgagccttcgtaagggttgactacctcagatttgctgcactcattgtggacttcatgtggatcacaacttctggataagaaggttacagctattaagtatcgatgtgaaacttgaaaccagctctactggattcctatcagaaatcctgcagaaagtcagccatctgggttctgatctgctgtaaaagatgaagatttaagtgaccttaattaacctgtcctgtgccccatctattatgaatactctgaggtggactgtggctggattagacttactagaacatgccggtctcaaaagaactgatgtgcttgggaaatctgtagtgctctgatttattaattaaaaac

SEQ ID NO: 4260 - DNA, 362 bp, Bos taurus
  Clone ID: 62-LIB3058-012-Q1-K1-H6
gtctcctccacgtcaatggtaacggtgggttccactaatccttgctccactgattcctttctctgacaagtcccatcacctgctaaaacttaaatgaacaaacttacatgccattttgtgagtgaacactttgaggtttttaatttaaaggctgtgtacagttacttttttatattcccattcttgcattcatttatacttaaattatgacaaaagtcgatgtccaccagtggtcttgaagcagtgtctctgtttccatgctcttctgttaatcacccatgccactgcctggggcgagagccggcagcctggacagaccatgtttgaagcaagagaatgcagtagaaagatgggaacacatg

SEQ ID NO: 4261 - DNA, 78 bp, Bos taurus
  Clone ID: 62-LIB3058-014-Q1-K1-H6
ccccgcgtccgctagatcgcgagcggccgcccttttttttttttttttggggagggggaaaaaacaggggaaagtgaa

SEQ ID NO: 4262 - DNA, 449 bp, Bos taurus
  Clone ID: 62-LIB3058-015-Q1-K1-H6
ggaagaggtttttgataacaggacttgaaaatgagctagaagagtcaagagatcttcggatgcggctttttcatatgtttttacagagcaacagagatgtgaagtacgtacgtaatgcttttggaactgtgattctgttggaagttttatcagggttgtcatagttaaagcatcaaccagccagtggaagttgcaaagaaaggggatcgaatcaactgttggcatctttcttgaagatgtggataagagttttgaatgtccagacaatggctacatctggcactttaaaatatatatatatatatatttaatttttgtttctccttaggactaagactctagaactgttttgtactgtgaattacagatgctctttgaaagcaaggaatattgattctcatgttcttcagaagctctggcagggataagcaagacactcaactggaacg

SEQ ID NO: 4263 - DNA, 354 bp, Bos taurus
  Clone ID: 62-LIB3058-016-Q1-K1-H6
cggacgcgtgggcagggccccagctcctggtcccccagaggtggccggagcacctaggcaggagaaggggcttgtcttgtggtttctctgatcaggttggtgtacccctggcacgggcattaagtcaaggtttagtaggcagagcgccactgaatttcatccctgcacgagggcctgccaagtggtggaggcggggattttctgggacttggtggctccagaaacgcattaatcttagctcttaggaaccaggcgccacctacaaggctgtgaaactagaaccttctccactaagcgtttttagaatcttagttttagaagaaaaatgccggatttacctgtcctgctttcgct

SEQ ID NO: 4264 - DNA, 421 bp, Bos taurus
  Clone ID: 62-LIB3058-017-Q1-K1-H6
gcgctccagcagcgtccctgctgtcacggccctctcctgtttcctgcgtagattctccagaaaacctggatgacatggtcaagaaggtgtcccagcagatcctggagaagcgggcctacatctgcacccaccccctagaccggacgtcctgaagagggcccgcgtccccacggccgccgccctggatacgccacagcagcccgaaggcggagaacgtggtttattacaaatcgactgtttctcctcttcacccgacctgtgggcactgctgctggatgtgttcttggcctgtgagtggacgcggggtaagcacggagctgcagagactcgccggctcggggggcacccagaggaggctggcgggcacaggtcctggcctgggggctacgtctgtgaggccgcacgttctccaagaaacagc

SEQ ID NO: 4265 - DNA, 320 bp, Bos taurus
  Clone ID: 62-LIB3058-020-Q1-K1-H6
tcgagccacgcgtcacgcatagccagcagcctcaggaacagctttaacatggcagatggcgacgaactgtgacctgttcgactggtgctatactggggtctgagagggccagggcaaaccgtgcatcacccttcatgcttcactatgtgcgtgaagtatcactctgcgccagcctaattttcctgtctgctaatgatcctgtgtaattagagctctttgacgcaccattcatgtggaatcctttttacttgttgctgtcctatctatacattttcaaaccaataggatgacatttaaaatcctacctaagggactatcct

SEQ ID NO: 4266 - DNA, 232 bp, Bos taurus
  Clone ID: 62-LIB3058-023-Q1-K1-H6
cgcgagcggccgcccttttttttttttttttgtcagagaggagttttattggctctcgattctgtcggggagcgggcagctcccctccgtctccatggcggagctgagggagagcttggatgggtgtgtgcgtgttggtgatgtcagatggatctaggaatctatacagaggccagagaccagaaaagggaaacaggagaccacgcagaacagccacgggaagggccaactt

SEQ ID NO: 4267 - DNA, 444 bp, Bos taurus
  Clone ID: 62-LIB3058-035-Q1-K1-H6
aaaaagaaaaaaaatattatcctttgccttaaaaaaataaataaaattttgaatgtcagatatactaactttaaaaatatccacttgtaccttggtggaatttatgaactcatatgaaaagagaaatatatctaacctatacaaagagaagtgtttatgtataaaagaaaaaaatatattagcataagaatcaacttctcatccacaatactaaaaactagatgtcactggaatttacagacttcagaaaaatagcagactatatattctgaaaaaaatttccagctactgaattcctaaacatgctggataaaatagtgcagtctctccacacaaacacaagcacacaggcttgggtattaagacagtaagggaaaaccagccagtgcaaactttgcatgaattaaaagctgcatagaagaatattgttgacaaaaattcatg

SEQ ID NO: 4268 - DNA, 392 bp, Bos taurus
  Clone ID: 62-LIB3058-036-Q1-K1-H6
tccggggcccttacagcctcagtgtgccagttgcaaggaggggtgacgaagagggtggtgcccagccgtgccaacacagtttcccgtggagaccgttttcttcttcccgggtggcatgagatgctcacgttgcccacagagcagggcttggccctcaggagccagtgctggaggccgcgccatgcagggggccatgtgctgtgcaggcctgcaacccccgtggagggcctgactgctgaagagggagcagaaagtgcgtcctgccgctgctgtgtgctgggcacagcggtcaccacaggcctaattggtgcgggtgaaggtcgtgagcactcttgctttggggtgggcaccccaaggggcctggcccaggccttaaacccgtgcacacagga

SEQ ID NO: 4269 - DNA, 448 bp, Bos taurus
  Clone ID: 62-LIB3058-037-Q1-K1-H6
atgttttaaaacatagcttattattactctcattcaaatttatttaaaagaaaaatatcagcaattaattccaggcatattttatttgaacccactaagctataggtcaaaacaaactctagcatatttattaaccaatgaggactttgatactaatagcaaaggcaagactttgtaaaagttgtgatttacgtggaaaattagtaaggttcatctggggttggggtggaaaatccacaggtatgctgcatgttgactgctgactgcaaatgatttagtgtctgtaagaccttttacattgtcagaataataaatcttagtattttgattagttttattgctcatttgtcttttattaatttcttgcaaaaatttctgagtggcagaaaatgaatttaaaatgctagaggttttttttttttctttttttgccacatgctgtatagct

SEQ ID NO: 4270 - DNA, 443 bp, Bos taurus
  Clone ID: 62-LIB3058-039-Q1-K1-H10
gacccacgcgtccgggaagtcctcccgccaccttgtgcccttcgccagcaagttcgtgcggttcacccacaagtacatcagctgcagccccgcagccgccgtcgccttcctgcagaagcatctgaacgtgctgcatgacctgtcccttgacagcagcgacctggtgatgcttaagtcgctcctggcggggctcagccttcctagcagggacggcggggctgaccgggcactggatgaggagggtgaggatgagagctcggctggctccctgcctctggtcagtgtctgcatcttcactcctctgactgcagccgagatggccccctacatgaagaggctgtcccgcggccagacggttgaggatctgctggaggtcctgagcgacgtggatgagatgtctcggcggagaccggagatcctgggcttcttctcgaccagcctgc

SEQ ID NO: 4271 - DNA, 345 bp, Bos taurus
  Clone ID: 62-LIB3058-041-Q1-K1-H6
aaaaagggatcatggtagacttttaatattttacataaaaaactgtatacacagcttatagaacttttatgtaaacatcataagctcaccactgtcatttgtcagtttatttaaaaaataaaaaaaacaagacaatttagtagaagtaccaccggatggggaagggagggggagaagagacacaagggggaggctcattgtctgtgcagagatgccgagaaaaggccacacagctttagagactgcctatggggaaaaaaatgcaaccaacataaggttttaagaaggccctaatactgagtactgccctttatcaaaagagtgctgaatacctccacaattgaa

SEQ ID NO: 4272 - DNA, 260 bp, Bos taurus
  Clone ID: 62-LIB3058-042-Q1-K1-H6
ccccaaaagataaaaaccaggtccaagaaatactgctattttcccccctccatatcttgaagtttaatcacaatgttcataaataagtacctttactaaaagaattcacaaggaataataattcaaccagatcttttaaaacctcactaaatttgaaacacttaaatgaattctcttctcgcccttataaccgggtatttgcttcccttgcaaatggacacattcttccaaaacacaacctcctttaaactatctttttt

SEQ ID NO: 4273 - DNA, 296 bp, Bos taurus
  Clone ID: 62-LIB3058-043-Q1-K1-H6
gagtaccctggcccatgcataagtggatggcaggatcaggctagcatcacctaggcgagttcgaatggaccaggaccttgtctcacactgatgatacctcagatgttggctggctatgtgaactgcctatttcctgtgccgagctgtttttgatttttaaataaatgaaaatctgtagattctctcctcccctgtcccaaaaaacaaagcagaataatgctttttgaaattgtctctaggattttaaagtgaaacaatgatggtactattcaaagtccgttatgtcagaatctgac

SEQ ID NO: 4274 - DNA, 380 bp, Bos taurus
  Clone ID: 62-LIB3058-047-Q1-K1-H10
gtgggtaatttatttttcagaatttaatgtatggacattaaaatacttgttagaatgtagaggaaaggaacagcctgttatatcatgcaaaaacgcttttcagcacattggggtgattgtagaatagctataatcctcttggtatttgtttaaatcttagaaaataacagttagtggtgcctcatgtaaaagttgttcttcctttggctggtaaagtaacatgtacaacactgattcctgctctgtgtatcaaggagacattgcctctggctgaatgaaacaaggtttgggaaaagggctcaaaaaccagaagttccctgtgctttcacagcttttgaaggttttccttttcacactggaaactttcttctggttttaat

SEQ ID NO: 4275 - DNA, 421 bp, Bos taurus
  unsure (388): Clone ID: 62-LIB3058-049-Q1-K1-H10
cggacgcgtgggttcgtctctaggtgattcgcaagaggaaaagaggtacctcacaggtaatgaagaggcatatgggcatccccacgtttcagagcagatcatgcacatctacagccagcccatagccatccttcagacatctgacctcttccccactccagagcagttgcatcctgctaagtcagctactctgccaagaaagggacagttagtctatggccaactgatggaaccagtaaatagagagaactttacacagacattaccaaaaatgccaatgcattctcatgcccagcccccagatgccagggaagagaacttcccactggaaggtcaacagagtttgccatcccaaacttcagattggagtcggtattcaaacagcctnctggaatctggttctgttcctggaacactaaat

SEQ ID NO: 4276 - DNA, 202 bp, Bos taurus
  Clone ID: 62-LIB3058-052-Q1-K1-H6
aatcccggtcgacccagcgtccacggcgcgtgggtgatcgtgagcggtttacagttacggcgcgcccgacatcataaggacccggtgctaccgcaccccacgtcgagtctggcgtacggacacatggtcgaacggagccattggaaggggcttacgtgactcatagagaggatggcggacgtattgatacttaacaagacac

SEQ ID NO: 4277 - DNA, 411 bp, Bos taurus
  Clone ID: 62-LIB3058-054-Q1-K1-H10
cggacgcgtgggtcgcgagcggacgtcctgtaatccagcccttttaaccctgaatctgtgcacacggggtgtggattagctgtgaggcagtaggaactcaagtatgtatgcgctgttgagcagaaagccatgggataggaaaacttgtgcagaagacctactacaagagtcaggacctaagtctagcttctaaacgaggccagaggtgctttgctatattaacaccaattcctgcactcagtcttgtgtgtgcaattcttgtgtaattagggtataaacccataggtggttcaacttgggtcttttctctagccttggaggttgggcgcaagttcttcaacatggctttgcagtgacccatgtaactcagtggtaaggctataagctcactctggttcagaactgttgggc

SEQ ID NO: 4278 - DNA, 328 bp, Bos taurus
  Clone ID: 62-LIB3058-056-Q1-K1-H6
ggaggcaggtctcctacttcatggcagggcctcttcagggacctccatgaaatactttagatgtggtttcatggtgactgggtctgctctctaggcagtggtacagcatggctttgaggccagggcctccactcccacaatccgaagccaggttggtggcctggccccacaacagggatggtctccagttcccaccttggatcacggggtccatctctgtgcaccagggaagctggctacccacctgggcttctgagacgccttttggttttgaggtcctgttgcagtactggcttggcgcctcacaaaagacctgctttgagtctga

SEQ ID NO: 4279 - DNA, 358 bp, Bos taurus
  Clone ID: 62-LIB3058-057-Q1-K1-H6
actcggattggaatttcgacccagacgtacgcgccggcccgagtaggccagctgcgcggccggtgtctgccgcgagcctgccctgatcttggtacgagctcgtggagctgaggaagacagccggtagtgctggccggccactgcaggacaaggcagactgggtggtcacggcagttggcttcgtttgcgagacagttccgagcgtcggtgccgaatcacgcccggcaactcctatgataaagatcaggtgcctccttaaacccgagcggtcggaggatacgctgccgttggagcctgccggaggcacacgcactatgcccaggcgtttcactgcaccttctataaacagctgtataat

SEQ ID NO: 4280 - DNA, 321 bp, Bos taurus
  Clone ID: 62-LIB3058-058-Q1-K1-H10
atcgcgagcggccgcccttttttttttttttttttttttcaaaaagggagaatcttttaataatttagcacaaaaatcaaatgatataaacttggtatattccagaaaatattgctttcaacacttacaccatgatcaaaattcctttggtagcttttaatcaaaacgaaacatgctattatgtaaaatataaagtacttttaaatgttctcgcaaaagtatctttgttgtggttcccacatgaaccagcgtccgcggcgtgggtcccctatgcacacgcatgacagcggggcccacggggccacctctgcgccgcgtcac

SEQ ID NO: 4281 - DNA, 421 bp, Bos taurus
  Clone ID: 63-LIB3058-002-Q1-K1-H12
cgtcgtcttcctcaactcttcctctcctctctcttctgcaccatctggtgtgcgtgcgcgttactcgccgcgtggatcgaagaaagaggcgcacgggagcgagctacgcgaagcaaggccatggcgaagggcgggctggccaagcttcggtgcatgatcaagaggtggcactcgtccagccgcatcgcccgcgcgccgccgtctcccggccccggcgaggatgaccgctgcgccgcgcgcggcgcgtcgttccacggcgcggacgaggtgcccgagggcctgcacccggtgtacgtcggcaagtcgcgccgccggtacctcgtcgccgaggagctggtgggccacccgctgttccagaccctcgtcgaccgcatcggcggcggcggcaccggggcagcggcggcgggtaccgtcgtcggct

SEQ ID NO: 4282 - DNA, 376 bp, Bos taurus
  Clone ID: 63-LIB3058-002-Q1-K1-H4
tcgagccacgcgtcacgcccacgcgtacgcagctagcgccagacagagcgagaggcggtggtggtacacgcctacgggccttggtgatgggctgggctgggctcgtccgtcagcctggcgtgacaggccgtcggcgtcgtccgtttctgccgccccatgctcggctcggctcccatcccatgtggagggaagagaagggtggggggagctggtcgtcggagttggtgcgtgcttcgtttgcttgtgctttggcgccatatcgctgcggagcgctgtacgtagccatttttcgccggggagggatcctcatcctcctcgttggcttgctacgtgttccttgccgccattacgaaaccttaattgctcgctttacacg

SEQ ID NO: 4283 - DNA, 279 bp, Bos taurus
  Clone ID: 63-LIB3058-003-Q1-K1-H4
atcgcgagcggccggccttttattgtttttttatcgttttattttttttattttgattgggtattttgatttttgatcattggggtaatcacgtgttcgaatttataatgaatcgttatagtactgttagttactggagaactattatgagcttttggagggggagagtcagggcagcccaagggggtgccagagaatttatagggaaaaactatgcctaggatatggaccagaacgggactaccaagcaggtcaccatggggagagttcaacagggtt

SEQ ID NO: 4284 - DNA, 392 bp, Bos taurus
  unsure (374): Clone ID: 63-LIB3058-004-Q1-K1-H12
ttgaattgttgatgaccttccttttctaggatagcaatatagtgttatatttgtgtgagccattcacatagaggcaagcatacacaggcacatggttttaaaaaaccacactgatgccttgataattgaaaagaatacaaacattccatatacatatataaattagaagttagtgactgggccacttagtcatgaaaatttgccttatacatgttgtctaattatcatttctccgcaaattttgctttgtaggaatactgttggaagatttttggaagaaaactgaaaacggcataaagtgaagatcgacattaaaatgaagtgaaagaaaactatagtggcatagaaaaagttaaagcttcggtagttttttntttttttttttattaaaa

SEQ ID NO: 4285 - DNA, 454 bp, Bos taurus
  Clone ID: 63-LIB3058-004-Q1-K1-H4
gggacttgtcagaaatcatcacctagggtaaaagcactgtaagaaccatgcctcactaattaaaatggtagagctggtcccagcttgcatattttctttttttatccttagttaaaatgagttcttagccatttgggtctttagtcctttgagaagctgatgcttaaatttacagatgctctccccagaaaaagccacaaacacaccattttcacaccatgtcagggtacgcaggtatccccctccacatctcctctgggacccttgtgggcccatgcatctcaggttgactcccaagttaagtccttagagggtatctcactgaacaatagatataaactgaaaaagaaagaaatctgtaaaaaaaaaaaaaaaaatgtgtgatgatgcaggcaacatataatggtacccgggaatgcacatccaacgtggagagtgaactctgtgttggagc

SEQ ID NO: 4286 - DNA, 401 bp, Bos taurus
  Clone ID: 63-LIB3058-007-Q1-K1-H12
catatattttacctgtatgttgagcctaggttattaaatcaatccatcattaatagcatgactaggtatgaatttccaagaagtttttaaaacatgagtaagatttaatgaaagttaagttggcaatgaaaaagtcatttcgcagttttcaaggacatggaacttggtgatcaatatgaattgattattagaatattagttatgttaatgaagcttttgaaatttccatcagtcctaagctaaaagtccttattacctgtacatccttttcaattaacttaaaggaagaaatttggaaaccacatgccttttgggaataattgatttaaaataatagctgattggcgttgttaatgagagcttcattttgagtatgattctggtaaatggagcatgtttag

SEQ ID NO: 4287 - DNA, 404 bp, Bos taurus
  Clone ID: 63-LIB3058-007-Q1-K1-H4
ctcagggaacctctctggcgcccgaccggtggcgctatctgccagcccagggggccttcccgcgtccactgccggctcatcaccttctcctcttgtctccgtagcttccgcccagcgctgcccgtctcctacctgcaggccgagctggccttcgagggcgaggccgactgccgggccttcttggagcccctgggcctggcctacacgggcccggacaactccagcatcgactgccgcctcagcctggcgcagctgccagccttctgagcaccagcgccgtgggggcggtgggccgggttgcagatcttgtctttgagccatggacttgggatgtaaattaattcgtggggagagggctccaggaagagccctcgttcctgcccccgttttcccaccggggagtc

SEQ ID NO: 4288 - DNA, 227 bp, Bos taurus
  Clone ID: 63-LIB3058-015-Q1-K1-H4
gctgcatctcaccttgatttgctgcgtccatcctcccccgcgtggggggaacagccggccagacccacggacctacagctgagggccgccgggggttgggggcgggggatgccgggctgccgcatcagcgcctgcggcccgggggcccaggaagggtcggcggaaccgggatccccgccggcgtcggcgtcccgggagcccctgtcgtgccctcagcccccatcccc

SEQ ID NO: 4289 - DNA, 453 bp, Bos taurus
  unsure (420): Clone ID: 63-LIB3058-018-Q1-K1-H4
gttgtcattgaaatacttacttggatttcagggtctgagtggttaggaaattagggaaaatcatatgcagaccccatagcattctcaagtgtgactgctttgagcagagatttgtttttttgtggctaagagggaaacagaaaagtgcccattaaactattgtatctattgtatattgattatatggccttcctcatacttggagagaaactgctaagacctgttttccctcagcttctagttatcattcttgtccataagtgtcatttctgatgtcagtgacttcaaaaggtcatttcttttatctgaatgaaaatagtggtattaagactgtggaaattatgtaaaacctgaaatagtttctaatagcagctgagggttgtaaagctccttgacgttaattacgcatatgccagacanacctcttatttctggttagctgtgcatatttaa

SEQ ID NO: 4290 - DNA, 447 bp, Bos taurus
  Clone ID: 63-LIB3058-019-Q1-K1-H12
ggatggacccactcgtacggaaaagcagactatacagtcaagccttgatacagtcaatagagcattgttaggaaagcggatcctatgtactgatttggaagataggtatttcctacttatgaggatgaaataactaatgagaatctgcatatttattatacatgtattatgcaagttacaagcattctatgtacagaactatattcaacagtgagtgtatgtgtgtgtgcctgtgtgtataaaaataatcatacagattaacctgctaatggactcaggcaagtcatttaccatctctgggccttttttgcctgtcctctaaaatcagagaattgaacaactttatgaggtatcttccaattatacattccaaccattttgtcagactggcaaattgtattggcttcttcttcaacagtgttgttttgtaggtcattatttcatata

SEQ ID NO: 4291 - DNA, 160 bp, Bos taurus
  Clone ID: 63-LIB3058-019-Q1-K1-H4
gtccgattcccggtcgaccagcgtcgagcacaaaaaatgaatatcatctctgcagacatggatacaatagaggtggagctgatgataactaagagaaaagacgaactctatatattacactggaatctgaattggtcacagatgaacttacctgtgaaac

SEQ ID NO: 4292 - DNA, 329 bp, Bos taurus
  unsure (105): Clone ID: 63-LIB3058-020-Q1-K1-H4
ccaaggccagcagccgcaggagcagcttcagcatggaggagggcgacgtgctgtgacctgtgcgacaggggcgggcctgggggctgggagggccagggcaaccgncccccacccttcaggctgcacttgtgtgtgaagtagcccctgcccggcctcactcctcctgtcggcccccgcaccctgtgtggacttagtgcccgcttggcagcccgtgggttggaagccccccacccaggggcagccctcttcatggggctgggcaggaagaggccttcagcccggctccttccagaggtgaaatcgtgagggcaaggcgagggggcgccgca

SEQ ID NO: 4293 - DNA, 113 bp, Bos taurus
  Clone ID: 63-LIB3058-021-Q1-K1-H12
cccggtcgacccagcgtccgttgaggtgttggagaagactcctgagatttcgtatgatagccaggagatccaaccaatcgatcctatagaaatcaatccggaatattcactgg

SEQ ID NO: 4294 - DNA, 258 bp, Bos taurus
  unsure (175): Clone ID: 63-LIB3058-022-Q1-K1-H4
tcgcacagccggggatatggcagacgctgatcctgtggggagtggccagcagacggtcatcaaggggatggcgtggcttggggctgctgaccacatgggcacacggatactttatctgaagagtatttccaaagtggagcaactgaacactggtgggaatagaaaatgtactttntaccttaacagagaaggaaacaaactcattcagactggtgataaaagtcagaaaacacgttttcttctcaggggaactgggga

SEQ ID NO: 4295 - DNA, 183 bp, Bos taurus
  Clone ID: 63-LIB3058-023-Q1-K1-H4
cgcgagcggcctccctttttttttttttgccctgcagaggagttttattggctctggggctaacaggggagcagtcagtaacccatgaacaacgcttaccgttcttgcaactactgggactgacttatgcatgttggagatgtcagattgatctaggaatctatacagaggccagagaccaga

SEQ ID NO: 4296 - DNA, 62 bp, Bos taurus
  Clone ID: 63-LIB3058-027-Q1-K1-H4
aaaaaaaaaaaaaaaaaaaaaaaaaaataaataaaaaaaaaaaaaaaaaaaaaaaaaagaag

SEQ ID NO: 4297 - DNA, 262 bp, Bos taurus
  unsure (54): Clone ID: 63-LIB3058-028-Q1-K1-H4
cagctgctgcacaccatcgccgcctgcgaggagatgctacggcagctggggcgncggcgcccggaaccggctggtggcgggaatgtctcagccaaacctggagcgccctcccagccagctgtctcctccagaggtggctttccaaaggatgctagcgatggagctgcggagccttgaccatccccgagccgggcgccctatcttctctccctccccggggcttgtggctggactctgaacaactccctttcaataaaagggc

SEQ ID NO: 4298 - DNA, 174 bp, Bos taurus
  Clone ID: 63-LIB3058-030-Q1-K1-H4
ctggtaccatctgcccatgtgagttcctcacctgtgagatggccgtggcgaatgcccggtcttgggaggtctcctttgattttctgacatgctttgatgtgaaatttctggaaatgttgacagaacgtacaaacattaacacacataaagcacgacagtaattttgatcaagat

SEQ ID NO: 4299 - DNA, 285 bp, Bos taurus
  unsure (157): Clone ID: 63-LIB3058-035-Q1-K1-H12
cttatgcaccagcttcccgcgtccccggcgcagcttttccgtgacgaccctctcgctcccgggctgagccgagtcactggatgttgctgaaactctggagatcatgcgcgggtttggttactgcttccccgtcaggtgccactgccaccgtcgtcgnctttgctgccgacgtccgcgggatgctcagtaacccgctgcctgacccccgcgatcttgtattctcccgaagccgtttgctgctgcacagttacgcgaactagtcatggtgctgtgggagtccccgcg

SEQ ID NO: 4300 - DNA, 338 bp, Bos taurus
  Clone ID: 63-LIB3058-035-Q1-K1-H4
cgacccacgcgtccggcaggagacagacagcagcagggctggttgcccatactctatttgtccaaaatataaagtacagtgaccttcaaggggtagattacacacgaacgggtgcagagctcacacagactcagactcgtttacacgcagagcactcgtccacccgaacgacagtgacagttcccatcagtcggtgcggctgcaaagcaaaagctgattccacccccggacgcaggcctgagggacgcacgccgggcactggaagcccgcaaatcctcgtggtgcccgtgtccgggtagctttggcatgagcttggcgggtatagggctgggcggggc

SEQ ID NO: 4301 - DNA, 258 bp, Bos taurus
  unsure (171): Clone ID: 63-LIB3058-036-Q1-K1-H12
tgtgacttccctggagcccacacgtgggcccagagcacattgtcaccagactcaccctctcttgctccaccctccctggaaaacatcaaggtgtgtggcagttacctttttgagctttggaacaggcagactggaattttcctctgctacctcttgtgtacaaaatcttgnttatacaatttcaaaaagaagtagataaactaaggaagaaacttcattctaaatttggttcactgaatggcaaaattcttagcttct

SEQ ID NO: 4302 - DNA, 223 bp, Bos taurus
  unsure (106),(122)...(123),(170)...(171),(211)...(212): unsure at all n locations; Clone ID: 63-LIB3058-036-Q1-K1-H4
acccacgcgtgccgtcgtagatcgcgtagcggccggtttctgacttatatgtgcggtctcagtaagagacccgggccaggagatccccaagtacctgggcctcggncgagcacccatggacnncacgccaggcacaggcttccttccccagacacccagagacacgggcnnatcctcgactccctcggcccgcttctttggcttcggacannggggtgcgccc

SEQ ID NO: 4303 - DNA, 82 bp, Bos taurus
  Clone ID: 63-LIB3058-038-Q1-K1-H4
cgacccactcgttcgatcgcgagcggccgcccttttttttttctcgtttatttcctaaagcatatttaccaatggggccttt

SEQ ID NO: 4304 - DNA, 281 bp, Bos taurus
  Clone ID: 63-LIB3058-041-Q1-K1-H4
cgacccgtctgccggctgctatacatttcagattaccgagtctgtgtggactgagcgtgtggaaatgccaggatgccgtagcagtgggccatgcatgggcatgcagatgtatcgagctatctataaaggctgagtgagcctgatatcggggagcttgtatacatataagagccatctatactgtcatcataagaataccaccaccacgcccattcagcatgagttcagactgacccgtgacacaaagaagaggacgcactatggctccaatggggtcacta

SEQ ID NO: 4305 - DNA, 298 bp, Bos taurus
  unsure (87): Clone ID: 63-LIB3058-043-Q1-K1-H12
gattccgacccactcgtccgcaaagatgtgctcgatataagagaggtattctgtgagatctcccgccgtcctgacctggtcaggggngcttgaactacataagggcatttcaaaacaactatgacacagatcagctggattcctgccaccaatgaccacctgtagatgactagcttattcccaaaggactccaggagcaggggtatctgaatcccaccatcaaacagagcaaccactgaacaatgaccgcactcacatgccgtctaagaattaagaggaccctaactgaccatccatc

SEQ ID NO: 4306 - DNA, 68 bp, Bos taurus
  Clone ID: 63-LIB3058-045-Q1-K1-H12
cacgcgtgcgaaacaagttggggacacagatttggctttttggattattattacattgcatatttaag

SEQ ID NO: 4307 - DNA, 396 bp, Bos taurus
  Clone ID: 63-LIB3058-045-Q1-K1-H4
atcgctatccctagtcctgttactaagatttaataaccaaaatgataagggggactaatatataacattaccgaacactgaatgcttaacactttgcacagaaagcctccactacctatacaaagttgcacacgcattcaccatgcaatgcatattaggcttctaatctaacacgcttcaaagcaccgttccccaaaacagaattacaagaaacactgagataacttcctttggtttaaataggcggcataattattcttttctaatgcaatactcactgcttctgctaacctatcctaggaacagtagaactatctatgtactccacagcgaacttacacatgatcaagacagaactcctgaaccctgcaataatctgattctatcacgatagta

SEQ ID NO: 4308 - DNA, 247 bp, Bos taurus
  Clone ID: 63-LIB3058-046-Q1-K1-H4
aagagttgaaaacttctaattgctaattagtactgagaaaatgggagctagcacttagaataataaagacaaaactattttcttgaaagcaggtatgtgattggatgtttttaaaaaaaaaaaccagcatcatttataatctccaaaaaattacacgagttcagttggtaaatatagtagcaagtaggttcagtattttaatttaccaatttaaaattctaggtcctttatggaaaaaagtcccaca

SEQ ID NO: 4309 - DNA, 294 bp, Bos taurus
  Clone ID: 63-LIB3058-047-Q1-K1-H4
ggtaattaaaagtatgtcattattttatagtttttaaaccaatcacccatccaaatttgtttgacgcagtgattttatttttttattttatatttaaattaatctttattggagtacagttgctttataatgttgtgtcagtttctactgtacagcatacacaaaattttaatttacataaaattatataatagagtcacaaggaataaaacatggaatattgaggtgaaattaaggggaggcctagacagattttttcaataatgataatcagaaatgtacagggtttcgggg

SEQ ID NO: 4310 - DNA, 156 bp, Bos taurus
  Clone ID: 63-LIB3058-051-Q1-K1-H12
cgacccacgcgtccggctatttggtgcttgtatgtgactggtttttgtactttttgctaagccttatttaaaggttgtgtgccatggaatatgtaggatatgtccagtcattttaatgctgatggggtctttgcgtttttgttgcagttttcactg

SEQ ID NO: 4311 - DNA, 371 bp, Bos taurus
  unsure (336): Clone ID: 63-LIB3058-052-Q1-K1-H4
cggacgcgtgggcgaccgtcagcggtcgagagcgaacggcacgcccgccagcaggaggacctgatgctcccgcacccctgtcgggtctgttggacggacagatggacgaacggatccatgggaaggggctgtgggggctcagagagtggatggctgactttctgagacttggcgtgacaccgggattggtctcttctcttaccggtagcctaggtgagtgcttccctgcggttcatctcctgccgtctgggccttcctggagcagatgcacaggctgccgcaggcttctcagcaccgaagaccctggttcaccctgcagctggtctcctctggcanacacccgcagacgctgacactgagtctctggagac

SEQ ID NO: 4312 - DNA, 393 bp, Bos taurus
  Clone ID: 63-LIB3058-053-Q1-K1-H12
agcagtcagttgtacagctatggagcttagatgagatagatcgtctaaatgcaccattcgagagtgtgtgtgtatatacataagtgtgttttatgttctgtgtacagtacagtatcatgcttacataatatgttcccagaaagaatgtggagagactaaaaacagggattcagaaaaagtgtgagggacactatattgcaaagaaagaagtcagaaaagattgatacaagatgggaagaaatatccagaaatgctagaagaagagatgacagagtttgatagatgtgtcaaaaagaccaaaaggtataaaatctttaagccgagaaagtcatttttattagcacaatggtaaattaaaggcaggtatttgatactgaaatgaccagtacagtg

SEQ ID NO: 4313 - DNA, 383 bp, Bos taurus
  Clone ID: 63-LIB3058-053-Q1-K1-H4
gtcatgtggtggaaagtttccacatgtgatgtatgacaatactgcttttgatggttaaaaatgttacttattttacatcatatgtaatcagaatagctttgttcagatggtaatcattattcaagctgtatcctttacaagcaaaatactaaactcagtttttaatgttgcactggaatgttaattttgaaataggaattactggaaccacagatactgagttatgtcactgaaatgcccttgaaggagatggtctccctgtgttctgccccctgacagagtggggggacctgtggactgaagtcctgacatacatgtgctcccccatctccagtccctgtccctagctgggcaagccacgctgggcaactgtagttgagtct

SEQ ID NO: 4314 - DNA, 357 bp, Bos taurus
  Clone ID: 63-LIB3058-054-Q1-K1-H4
ccgtccggaatcgaggccacgcgtcacgcgagcagaaaatagactgaatttctttgattgcaagacgcaagtgagggtaggtaaagattgactaagccataagacttcagaaaacaaggcaaggcataatatcaagatgatccttcatcatcatcaaacgcatcataaagcacactggaatgttaataagaggaataggaattactggaaccacagatactgacttaagttactgaaatgcccttgaatgagacggtctccatgagttatgcccactgacagaatgaagggacctgtggactgaaatcctgacatacatgtgctcccccatctacagaccatgtgcctagctgggca

SEQ ID NO: 4315 - DNA, 335 bp, Bos taurus
  unsure (289): Clone ID: 63-LIB3058-056-Q1-K1-H4
aagagttgggtctttacagttgatttcttatttaaatagcagtgtttttcttctgagacagaaccaaaaacagaggggaccgttgccacataaaaagcagccaggacaatggtcaccctggaatggttaagacaggcaagatgaggagaatctgggtgtttcctgaaaaaaatcgtgacattcacagcagcctctctgtgtctcccaggtccatggcaggtgggctggcggtttgcttacaatgatcaaaataaaacaaaatccctttgtgaaagtgttggccactcanttgtgtctgactctttgcaaccacagagactttagttcaccaggct

SEQ ID NO: 4316 - DNA, 442 bp, Bos taurus
  unsure (331): Clone ID: 63-LIB3058-057-Q1-K1-H12
tcgacccacgcgtacgggcccgggtgtgcgcccatccacgctgccgtcggccctgatgatgcctcggggtccgaggaggccgacagagaaggggtgccggccccacactgacgcctgggccctcggtccttggtgattctcgccatgaaccttccagcagcctcagccctcaaggtcccatttccctttcctcctgtgtgcacggtggcactgggctcgtcgtgtgtgcttgagtgcgtgctcctggctccagggctccccctgggcctgccagtccctgtgaagccagagcccctgcccctctgtgcagtcagcctggggtcttcgcggncccgcacttcggcacccagatggcctgcccagagcagtggcatcatggtgcccgcctgctccctgggccccgccagtcccccacgaccccctggcgggctgtgtgaaggat

SEQ ID NO: 4317 - DNA, 457 bp, Bos taurus
  Clone ID: 63-LIB3058-057-Q1-K1-H4
aattttcaaagaaaagttttatagccagagttttatccttaatgttttggttagacttcataatttgttgcttaaagttttttatgacaggtaaaaagagcagcttttcccattttgaagaaaaaccttgtcatttattttcttgatgtagaaaatagaccagtttattgtgatagcttacaattttttgagatgatttctgattttgaaataacccatgtaagaacatgtgataatgacaaatgtacaaatgggattcattgtatctgaaagaggcctaagtagaagagaattcaggattagactggttttcactaggcaccatccagtttcacattctgtgattgaaaaatattttttccaaaattatttcaacctgattttaatctttgctgtgggatttgattccaaatacctttgaataactttccagtagttaaaaaattgaattactact

SEQ ID NO: 4318 - DNA, 333 bp, Bos taurus
  Clone ID: 64-LIB3058-001-Q1-K1-H8
ctttccctaagggagggagagacaccctgctctccacgtccaggctggggccacacgcggcctctgccgggctcccctgcaccccaggctcacacgcgccgcaggccgtccacctctgtctcctgagtttccctgttgcccggtggccgagggcatctgcttctccctctgctcatttgcgtctggctcctcagcaaaggcgaaggaggaaacatgacagaggcttcatctgcgcccaggccggccgacgcctccttctacgggcctcactggagcgagcctctgtcccctggagagaagttcaaaaggcggttgttgtttcttctgactcat

SEQ ID NO: 4319 - DNA, 457 bp, Bos taurus
  Clone ID: 64-LIB3058-005-Q1-K1-H12
gaggattctaggccagggtggtgtgtgagatgctgccccctagtggtgacttccggacgctttccttgctgctctcttgggatgccacccttcccacgggagcccagccagggcctctgcctccacggggaactgcacgcaaggctgaagaccctttggacagctgtgctcttgggtgcagcttactcctagccaggttgtccccattcagaggcaccttctcggggtctcttggccgagaggtccttcctgagggatctcgaagacacttttcctgcactctgactcattgctcagtactttccatccttccctgctcccggaggctgcaagtccatgaatcaacaggagccttttgtttggagccccctctgcagtgagacgtccccatccccgacagccgacccacactgaccttgacagtgcctttccacaagaggaggaaacagaacaaggg

SEQ ID NO: 4320 - DNA, 370 bp, Bos taurus
  Clone ID: 64-LIB3058-008-Q1-K1-H12
catatatcttacctgtatgttgagcctatgttatttaatcaatccatcattaatagcctgactgggtatgaatctgcaagaagttgttaaaacatgagtaagactgaatgaaagttaagttggcaatgaaaaagttatttcgcagttttcaaggacatggaacttggtgatcaatatgaattgattattagaatattagttatgttaatgaagcttttgaaatttccatcagtcctaagctaaaagtccttattacctgtacattcttttcaattaacttaaaggaagaaatttggaaaccacatgccttttgggaataatcgatttaaaatatcagctgattggcgttggtaaagagagctttattttt

SEQ ID NO: 4321 - DNA, 423 bp, Bos taurus
  Clone ID: 64-LIB3058-012-Q1-K1-H12
taacatttcagtaacaagttatactccccttggcttctcacaaaggaaaagtaatttccatattaaatatatatttccatcttaatttgagatgtagtttgagccccatcttgtcaactatataatatatgcagggaaaaatatatttaatatggaaattacttttcctttgtgagaagccaaggggagtctaacatgtcagtgacaagttataagcgcgagaaccattatgaccccaaacgagcggatcttcgttgtcgttcttgctgcgtgggtgatactggggaatttttgaatattaattgattgaaaaaaaatgctttcaagtactgtaaagctatgaatgaatttaggctcagtggtttcacctgagcaaagaatttgtgaactgaattaaattggaatgaagggtaaagacctgac

SEQ ID NO: 4322 - DNA, 224 bp, Bos taurus
  Clone ID: 64-LIB3058-014-Q1-K1-H12
atactccttaaagagctgattatttgtacacttacccgggaatctctgagaaaagatgtaaaacactatgggatggctatctgagattcccgggtaagtgtacaaatactccttaaagagctgattatttcactgattttacattttcattgatatctggagtaagccccccagaggtcagacaaggaacaggtgaaattctgaaacaggagaaaacgaataat

SEQ ID NO: 4323 - DNA, 142 bp, Bos taurus
  Clone ID: 64-LIB3058-014-Q1-K1-H8
atgtgtaaagcatggccagtatatccttctcagttttcattcctgcaaagtctatgcattggcttgctttttcacttaatatttaatcatcatttcccatgtcatttaaaactggtggagagaattatttgtaggttccaca

SEQ ID NO: 4324 - DNA, 128 bp, Bos taurus
  Clone ID: 64-LIB3058-015-Q1-K1-H8
gttatagatcgctagcggccgcccttcaggagtatcttgttgttttcagatattgtcggttttttaaagaccatgaatcgttatttgatgaccaaaactccttgcttaaagacagaccaagctagatg

SEQ ID NO: 4325 - DNA, 413 bp, Bos taurus
  Clone ID: 64-LIB3058-016-Q1-K1-H12
ggggaaccggaagcacaccatcagcccggaggactacatcaccggtgccctgcagatctacacagatatcgtctacatcttcacctttgtgttgcagctcgtggggagtcgcgattaaggagcacctccagggctttcccttccctagagggctgggccctatgatcctggtctgggcctacacccatttccttctcaagtaatacgcccatttttctttctgtcccgggatgggcagcttctctcgctgtggatgtataggtacctggtggggctggaggaactagggactaactcttgcccttagtggacagagctgggccaaagatgtgtgttttccctccaccccactacagggcaccaaagccttaacagctggggttggagtcaggtggggtgaaaagagcctgttc

SEQ ID NO: 4326 - DNA, 312 bp, Bos taurus
  Clone ID: 64-LIB3058-018-Q1-K1-H8
acgatcgacagcaccccggtgaagcaggctggagggggcaggaactcagaggggatcatgtgcagaccccatagcattctcaagtgtgactgctttgagcagagatttgattttttgtggctaagacggaaacagaaaagtgcccattaaactattggatctattgtatattgattatatggccttcctcatacttggagagaaactgctaagacctgttttccctcagcttctagttatcattcttgtccataaatgtcatttctgatgtcagtgactttaaaaggtcatttcttttatctgaatgaaaat

SEQ ID NO: 4327 - DNA, 395 bp, Bos taurus
  Clone ID: 64-LIB3058-020-Q1-K1-H12
ccggatggacccacgcgttcgagagagcagactatacagcctagccttgttacagtaaattcaccagtggaaagaaagggtagcctttttactcatttggaagataggtatttcctacttatgaggatgaaataacaaatgagaatctgcatatttattattcatttattatttaagttacaagcatattatgtacagatgtaaatgcaacagtgagtatatgtgtgtgtgcctgtgtgtataaaaataatcatacagattaacctgctaatggactcatgctagtcatttaccatctctgggccttttttgcctgtcctttaaaatcagataatttgaacatactttatgagtgaatctttcaattatacatttcaaccatttttgacttactt

SEQ ID NO: 4328 - DNA, 191 bp, Bos taurus
  Clone ID: 64-LIB3058-022-Q1-K1-H8
tcgcggacgcgtgggcggacgcgtgggaatttcctttggggtaaaagaggattttgaaaccataaagtgttctgaaaaaatgaattctacaaaacatactttcttttcctttttctccccccggcactccacagacagtgtcctctgttcaattcctaacgcaaactccaataaatggcgatacacattcc

SEQ ID NO: 4329 - DNA, 136 bp, Bos taurus
  Clone ID: 64-LIB3058-023-Q1-K1-H8
acggacagagcccgatgctcccagggcatcgtgccctgcgggctgcaccgggcgggcctgagcgcggcaagggtggcatgactgaaggcgttcctcaccctgcccgtgctgccacctacaggaactgcaaaagccc

SEQ ID NO: 4330 - DNA, 359 bp, Bos taurus
  unsure (289): Clone ID: 64-LIB3058-025-Q1-K1-H8
tttttttttttttttttttttaacactagtggtgatgttggaggaataataaaagctggatgttgtggaggaggaaaacgacacaagctcctagtctcggagaaccagccaggcgggaggccggctgaccttccctctgaagggccccccagcctgtggccgacagaagcaaacccaggaggacatccattcccacagcagccttgcttcccaagcaccaccaggtgccttgcacccttcggttccaaatgccactctcctgtatcttacttttgcttaaaaagaatanaattaaaaccccaataaaggttagaaaaaccccaaccaccattaaagggtaagggccttttctggggctt

SEQ ID NO: 4331 - DNA, 426 bp, Bos taurus
  Clone ID: 64-LIB3058-027-Q1-K1-H8
cgggggcccacagcacccccccacccgcactgtccaatcccggtgaagaccagactagaagaggctccggggaatgctggtccctctgctcctccccttctagaccctcttcccctccccatcatgccttccccacacagactcccatctccattctccagaccctggaccaccaccttcccccttcccaccaggacctcttatgggggggctgccgggcacagttgtgcaggttgtgtactgcacaagggcaaactcatccgaggagacgtcatttgcatcctagacgtgtgtgtttatgacagcaaattttctgaacctcgaggaaggggcggcattgacctattcgcacaaaggcgccataggggctaacagtgtcagagggctcagaccctgcttccttcaggggtcctcccaggagccagt

SEQ ID NO: 4332 - DNA, 210 bp, Bos taurus
  unsure (87): Clone ID: 64-LIB3058-028-Q1-K1-H12
gaaaatcgagatggcggatctttcacacagcctgtgagatctgataccataagactcgtcagagagaacgtaggcagaatatactcncgagtttattgaggcttgacagaagtattacacatacagacactcctacattgaatccaatcatcccatttactttactgtatcatcatcaaaattatttcctcttaattaaaccattgacaa

SEQ ID NO: 4333 - DNA, 418 bp, Bos taurus
  Clone ID: 64-LIB3058-030-Q1-K1-H8
cgagtgtttataaagtggtaacaaaccattctggaaatatatcccatagaagctgatatttaacatacaagaaaaaaaaagtattgtctataagatgtttcttcagtactttttgatgctgtgtactgggtgtaaggtgtttgtcatcttacattagaaaagcccaaaaaaccaagttaaaaggtggattatagtaagtgtgcaactgtgctaactaggcttcaaagtaaaaagttttcctttcatctttgactgtgagatgttaaagggagacagctagtttcaacaggagacaccagacaaaaggttgccaactcgcatgagctacctgcctctttccatagagtattattgacatatctgtcagccctactgtctgtggaggtgcattgaaaacacattcaatttcttagatgca

SEQ ID NO: 4334 - DNA, 383 bp, Bos taurus
  Clone ID: 64-LIB3058-036-Q1-K1-H8
gacccacgcgtacgtggagatcgcgagcggccgctcttttgtttttttttttttttttttttttggttttgtgttaaattttaaactcccttttattgaaatataagtttggttagtatatttacaccacactttatgcacatatatacatagaaggcaaattctgtcaaataaaaaaaaaagtttttcttaataaaaaattaaaataaaaacaaagtaaagtgcataaaacggatttcttttccttccggtgaacatcctcattggcaaaatgttggccggttgggaaaggggagggattgaaattcattctttgactccgtgcacacaggcagtcctgcatttgtagcctttaggccaaggcgacaagctgttaaggaaca

SEQ ID NO: 4335 - DNA, 449 bp, Bos taurus
  unsure (424): Clone ID: 64-LIB3058-037-Q1-K1-H8
ctgtggctaggcagagggtatcctttaaactgctttatggccgttcatgcatcttggtcttagaaataacacctcctccaaacgttgaaaagcagcacagtttctctcctccaaccaggtttttgcgtataaaatacagcaaattcttgaggctcctgccctcatcctggcttagcacccaaatactggtgatgctgtgcgccctggatcaaaggcgtgcaggctggcggccctgggagggctggtattcggccatgccagacactggcaccaccacgtgggtcccagggagcggcttcctgccccagacagacccccgctctcctgtccctgacttggaaccaggttcccatcttgcagctgggtgtgttaccgagagggaagcctgagcaggtcagaggtgacgaccgaaaggcattctggngagtcacagggaaggcctggatgcc

SEQ ID NO: 4336 - DNA, 424 bp, Bos taurus
  Clone ID: 64-LIB3058-038-Q1-K1-H12
gtggaacaagatcaaactaccgtgcttcttgagcctggctgttctagacagagctggcagcaagagaggggcagagaggcctacagatgtggggtcccgcacctggtgagggagtgcacctgcccctcgcacatgtcacggacgggaacagttgctcagagaagctagaaacatgggcttttatgagatcattctgtttttaaatgattgcaactatttcaaagcctttttaaaccctgccacaactcaacagcatatatcttgggccagattcagtccagaggctcagcctcaagaccgccccagacacgagccaatacagtgagatgactctgggattgtaaaaaggtggaaagaggttattctttaagaactcacgttatcatgttcctctcttacagtcttgttgccctcacaaagccaa

SEQ ID NO: 4337 - DNA, 415 bp, Bos taurus
  Clone ID: 64-LIB3058-039-Q1-K1-H12
caggcatccccccaccctgttcacatgttcgtcctgcaggctcctggccagcggctcagtggagaagacggtgcagctgtcagctcacccttgaagatcagcgaggtccctgagggtccagggtgggcgacccttcacgcccaccttctgccctgggacggccttggacgcggccctggggaccctgccgccgggcccccatgcagagtgtggagaccggcctgtggctctgagcttcctttggtttctttcccgcctcctctcacctcttaaagcacttcctttcctaaccgatcacagtggagcggcttcgcggcgggagctttggtacgtggcaggcgggcgggcagctgggagtgtcccgtgtggtggccgcggctcacaccccggaggagccggatcggcgcgtgcggag

SEQ ID NO: 4338 - DNA, 275 bp, Bos taurus
  Clone ID: 64-LIB3058-041-Q1-K1-H8
gtgggccatgcatgggcatgcagatgtatggagctatgtataaaggctgagtgtgcctgatatgggggagcttctatacatttcagagccatctttcctgttggggcacctggaatctgagaaagaataagagacagagggagagaccagctgtgctcctgggtcgcataacacaccatgatgccatctaactgtcacagttgccgtaaaagtgtggggggaaagggttgtttaggaaaggggactatgttggggaaattcctacagttggctgg

SEQ ID NO: 4339 - DNA, 427 bp, Bos taurus
  Clone ID: 64-LIB3058-047-Q1-K1-H12
ctttgagaaagcccctcttggaatctgtgccttatgaagaagctctggcaaaccgccgggtccttctcagctctactgaaagtcgagaaggccttgcgcaacaggttcagcagagtttggagaagatttctaaactggagcaggaaaaggaacattggatgttggaagcacagttagctaaaatcaagctggagaaagaaaaccagcgaattgcagataaactgaagagtacaagtagtgggcaggtggtaggggtggcccatgaaaaggctgctgtggcgactgctacgggccaggaagaagcatccgctaaggctgtgccagaacccgtccacagcaccagtgagattggaattttaaccaggacatctgacagtgatgccccagatgtggagtctcgggaagacttaatcagaaatcactacat

SEQ ID NO: 4340 - DNA, 327 bp, Bos taurus
  Clone ID: 64-LIB3058-048-Q1-K1-H12
ggacgctggcggagcggccgcccgagttagaagacacttaggatgcccatggtgacacggaggctgagggatcctgacgtaaacccttgcttgtcgatgccactctgcctcctaaatgctgcctgtcttacatgtttaaggaatcggatgcgtctaccagatgcatggctgaaaacaactatgacaaggagagctgttcttctcacttcttgaagtacaagaactgccggaagttctggaactctgtcatgatccagagaagacaaaacggagtgaaagccgccatgcccacgggagcagagagagacgagatctttggaggatggg

SEQ ID NO: 4341 - DNA, 170 bp, Bos taurus
  unsure (45)...(46),(48): unsure at all n locations; Clone ID: 64-LIB3058-049-Q1-K1-H8
gacccacgcgtccgctagttctagatcgcgagcggccgtcctatnntnttttttttttttttttttttgtttggtttttaaaaaccggatttatttaaaatggttaatgtcttccaaacttttaactaaacgggtttaaagataactgataatcttctagtttttatgag

SEQ ID NO: 4342 - DNA, 351 bp, Bos taurus
  Clone ID: 64-LIB3058-051-Q1-K1-H8
tcggtcccagggcggttctgtccccaggcttttccgtccccagggaggttctgtcccagggcggttctgtccccagggcggttctgtcccagggaggttctgtccccagggcggttctgttccacggaggttctgtccccagggcggttctgtcccacggaggttctgtccccatggcggttctgtcccagggaggttctgtccccaaggcggttctgtccccagagtgcttctgtcccagggcggttctgtccccatagtggatctgtaccaaggcaattttgtcccagggaggttgtgttaccctgtagcttactccatgtgagccttccctggtttgaaactttcttt

SEQ ID NO: 4343 - DNA, 454 bp, Bos taurus
  unsure (444): Clone ID: 64-LIB3058-056-Q1-K1-H12
ctcactgcagaatgtaagtcctcggggtgcacagacatctacggacccacagttgtgaatcagatgatctgtgaacacttggaaagtgtatttgcattaaacagctttctaggtagaaacaggctgttttcaaaatgtttataaagaatcctataaccacaaacattaaaattaatgcttgaaaatctactggccacgtgtaactgcttaaatctaaattaagtttaaatttaagatttaaaattcagtttcttagttacactgattgcatttcaggtaatcagtagccatgtgtggctaccatattggacagtacagataaaacttcctgtgataatgaagatattttccattagacggtgctacttcagaggatagtcaacattttaaggacatgcaaaaggagaattactctctacatattaaaggagccaactttttttntttttttttt

SEQ ID NO: 4344 - DNA, 257 bp, Bos taurus
  Clone ID: 64-LIB3058-057-Q1-K1-H8
tgaaaactcagtcttcctctggcacaaggatatctgccgaaccatccagtcaggtcttcctcaaccttagaatcagagaggaagccgtccccactccagcagatcccttgtcctggctgggaagttctctgcaggaattgcctcttaggtcattagagattgaatgttgcttgtctctctaactgattgccttctaatgtgttaacctgtcccatgcttgatcatgtgatgatgacttatgtacatatgggattcat

SEQ ID NO: 4345 - DNA, 389 bp, Bos taurus
  unsure (308): Clone ID: 64-LIB3058-058-Q1-K1-H12
ggtttgcctatgtttctaaatactcatggattaaaaagtaaggctgagtttttagtgtaataaagtgactatattgaagtaacttaaaaaaaaaaaggttaattttacttacttgaccaaaaaaaatacgatcaattatcagagacaaactcaaagtgacaaatctgaaaaacaaaacagaatggtgactaacactttgaacctactgaaaatccagcaatggcatatgacttagtggcatatagcatcaaaagccactttaaaaatgcttcaaaagtttctccagctgaatatggatttacacgttntgaaagatatttcattgaaaaaagctgtatttaaactttttaaaaagtataaaatctgtattacctattgctgcataatga

SEQ ID NO: 4346 - DNA, 389 bp, Bos taurus
  Clone ID: 01-LIB34-003-Q1-E1-A1
gaactcctccatcgtgatgtctgtgtattgttgcttttcaataatcattctgtctggcttatacaggaatatcatcatcccctcccacagagctgaaattgagaagtgtagcagagatctttaaagtatggatttattaaaaggatactggtttgcaatttggtgttttgtagtatgtcagcagatggtagatactactgaggtttggttcttgtttctctttggatttttaacctgagccaagtgaaatcttcagatttatgccatctctgccaccctcctcctttctgcccactttggaataacttggaaattatgttcattcccttcagagtacagagtccgttgatcttctgagtcccctgatgcaatgtttaagttttgtacat

SEQ ID NO: 4347 - DNA, 405 bp, Bos taurus
  Clone ID: 01-LIB34-013-Q1-E1-A9
gtccacccacgcgtccgaaaacctcaaggacccaacggggtctcatctggaaaccagacgtgcccagcagagcaacacaaggggctggtgggaacagtggcagaggggtgggcaagcaggagcaaaccctggcccaagttctggtcctggcccagtaacatccagcctcagtctctggtggctttggcaacacagggtagcgagtaatgctaccaattcttaatcgagagactgactgccctggttcagaactcactgctaccactcattagccagtgcctaggtgaggaacttactctctagatgcctcacacgcttcctccacaaaatggagctaacaataggatctaccttgtaggattattgtgaaggttatatgagttaatagatgtaaaacttagagag

SEQ ID NO: 4348 - DNA, 355 bp, Bos taurus
  Clone ID: 01-LIB34-025-Q1-E1-A9
ggattcactcactgacccaaaagatgatccttctctttggcacatgttcttaccaagggtctcttctgagctgggctgcctctacctctaacgcctgtatttctcaaccaagtgtatctcaggcccccaagcacgaagctagagttggttttctgctactgcttggaaattattttgttgagtttgacttcctagaatttgtattatgaaatcaacaggcattttgaatgtgctttttcaaaaggtgtcttcccaggccaccatctccaccccaccccatccctttctgctttgaaagtcactgctgtgaaccaatgccctgaaccctgacaactcacagattcacaggaaatgt

SEQ ID NO: 4349 - DNA, 197 bp, Bos taurus
  Clone ID: 01-LIB34-037-Q1-E1-A1
gtcttactggtttgacagcagttacatgcaaataactccttataattactgaagactacacaccaattgggaaaccgttactctgatatttctgaatactaccaaccaaccttacatgttgtcttcagtcaaagaaaactatttattctactgttttaaaaaagaaaaaagccaacattaaaatgatctagttttac

SEQ ID NO: 4350 - DNA, 297 bp, Bos taurus
  Clone ID: 01-LIB34-046-Q1-E1-A1
gtcccatgatcctcgcttttctctgaattcatgtgtcttatttctcagtctctcgccgtattgcgctttcagaaaccctgcttgtcaagcgtgtctcgacaagtggtgccgaaatatggacccgaaagtaaatccagcctgagaagctagttcctaaccgaggtgaacgtagggaaatctggccagctaggcggaataagaaactacttggctctggctcaattttttctgcgctgatgcataaggaacctgagcaatttgggacccctggaaagccatctagtggtgtccaatctg

SEQ ID NO: 4351 - DNA, 100 bp, Bos taurus
  Clone ID: 01-LIB34-050-Q1-E1-A9
gatctagatcgcgagcagctgcgcgctcttccatccccacagcagccatagcctgtcattgacaccccatagatacgatttagagccatgcggagtctca

SEQ ID NO: 4352 - DNA, 131 bp, Bos taurus
  Clone ID: 01-LIB34-061-Q1-E1-A1
aagcctctatagtgagtcttactacacgcgtggcacgatcatgcggatctttacgcagctacggggcgatagcctttccggcctcgccacgtgtcacgggacaaagggctctccgcaccaggactctgtac

SEQ ID NO: 4353 - DNA, 368 bp, Bos taurus
  Clone ID: 01-LIB34-064-Q1-E1-A9
tgtggcttcaaccggaatatacttcctccccgttttctcccggtcggtataccccacaagaatgtgaaattctataaatttttttaaatttagacgtgattagtaatacagaataaaaactgctagtactgtaatatacatgaagttgtaagggtgttttcagtattcttggtcttctgttgtttttctgtcgtcctcttaactggttttttaaaataaaaatgaaactgtaatcatttttggtatatattcattaagattcctgcaacattatgaaatattaaaacttgcctctttaaatcacttgtataagtatgaattttaattttagtatttgaagctttgctaagtgaagatttccagcagct

SEQ ID NO: 4354 - DNA, 119 bp, Bos taurus
  Clone ID: 01-LIB34-065-Q1-E1-A1
gaaacgccatggtcggcttacctggcctgctgacacgattccttgctccgctgaggctctgactcttctgctcggtacaccgtcactgcgttcctaacgaagcctgtgagtagatgatc

SEQ ID NO: 4355 - DNA, 238 bp, Bos taurus
  Clone ID: 01-LIB34-077-Q1-E1-A1
cctctctcaaataccttcactttaatttaacttcaagcccaagcgttctgggaggtaaacagtctggtaactacagggggtgagaggcaggatgcgccccaggactacaggagaagcactggggtctggccactccactgactctacagcagggccttggacacgagagccccaggcagctggaagacacacgactcctcaggttcccgcgtgaaggcacggtgcccatcaccaaagg

SEQ ID NO: 4356 - DNA, 456 bp, Bos taurus
  Clone ID: 01-LIB34-078-Q1-E1-A1
acaccctatagaaggtcgtattaaatgccctccctctcgtcttccattttcattcagaatttttagaataccactattcatgtggagctacactacccagtattgtttaatacatttttatttgataaacattcagtgcaggaaactgtgattgctttatgtttatgtatataatcttattctgtggttatcagagttttaatgtatggtacatttgatttttattttttacatgtgtagttttctctcttcacagtcaaacatttatgttatggggggtgggggtagggaattgagttgataggctcaaaaatccccatgtatgtatctgtctattgggcatatgttaaatttgaaacctgagtgatatattcaatagtttggtaatgctcttcttcagtgtttacaatattaccataatcatctacaagaacatgagtgtcctatttgcaaata

SEQ ID NO: 4357 - DNA, 345 bp, Bos taurus
  Clone ID: 01-LIB34-079-Q1-E1-A1
ggaaagaagcaaatttagagaagcatgctttcttggactgcttcatggcatttgggagcgggaagtaccagtgtcctggaaggtggctggctctgttggagattcaaatatgtattattttaatattttattattatgactgcagtcttcttgacccattgccaaaacagagttctctccacttggtgggtgtccagcagccggaaggacgatgccggattcagtttaaacaaagaaaatgatgtctgctggagggccagggccatctggaggaatgactgcctcccatccagtagcctggcggcacctagacctgagtttgacaagaacacgtcacttaatttt

SEQ ID NO: 4358 - DNA, 322 bp, Bos taurus
  Clone ID: 01-LIB34-083-Q1-E1-A1
tcgccaagcactttgcagaaaacaggcagcttgtacatgggacgacggcataagcccccacactcaggaagccagcacagtgggcaaggagggccggtgatcgggcatctgaagaggatccaggccctgggcccacgcgagtgtccctcagccctgccaggcagaacgggaccatcctgcagcaggcaccctagacagggcacccctctcaccctctgggtggctgcctggctgtccctcacgcagcctgtctttgccagtctgtccacatctccgcctggcctgactgtgacgggagaacgggtgtggggcactcaagggc

SEQ ID NO: 4359 - DNA, 242 bp, Bos taurus
  Clone ID: 01-LIB34-085-Q1-E1-A1
agcagcatatctgtctcaatgtgcgcattcagcacatgcgttgtgattatccaagcattcatgacaaggctttcgatcgagagcagtattagcatgtgaaacataaactggacacatctgagcatgttcatgatcacgttaccgtgagctcaattgcagcgccttatgaacacaggagacgcgacctgcatgcgtcagtccctgctgccccatacccagatggccatcacagatgccattga

SEQ ID NO: 4360 - DNA, 397 bp, Bos taurus
  Clone ID: 02-LIB34-007-Q1-E1-A9
atcatggcaagcgtggctgcatttctgacctgggctctggccctcctctcactgctttcacccacggaggcacggagaggcttctgggactacttcagccagagcagcggggacaaaggcagggtggagcagcagcagaagctggcaagggagcccacgagcctgaaagaaagacttgagccagacctcagcgatatggacaagttcctggaaaagctgggccctctgaacgggcaggggagggagattcccaggctcccacgcgacccggtgggcatgtggcagcagctgcaggaggagctggaggaggtgcgggcgcgtctggagccctacatggcggaggtgcacgagcgcgtgggctggaacctggaggggctgccgcggcaactgcaaccct

SEQ ID NO: 4361 - DNA, 411 bp, Bos taurus
  Clone ID: 02-LIB34-017-Q1-E1-A5
aattaaagtggttttctacgctcatctttttcccttccatttcagcagtttttaattagaaaattaatttgtttgctgtataaaaaagattcaaacagaataaacatttcagttatgaatagtaccccaccccacaaatgagtctcctttatatccgttacaatatttatgtatatattatttcatacctcttaacatttacatactatgtttgtccatttacgtactatgcatatttttatatgttagaacatatggctggactccacttttttttcatggttgcattgcatcccacaacattattctgctataatttcatcatttcctattgttgagccttgaaaatagattcattctgggttaaagggtggtacttaattaatttttttgaaaggtactgccaaaatg

SEQ ID NO: 4362 - DNA, 375 bp, Bos taurus
  Clone ID: 02-LIB34-018-Q1-E1-A5
acttaggtacacattttgttcaaatcagctgagatagccagttttcataatttgtccaggtttgtgcttcacatcagtgacagcatatgaaccactcccactcctgattacataagagcaaagtttaagagactgttctcttgctgctcggcttgtcccaggccataattaccactgtttacaatccttcagtctatgtattcattctgggtacaggtggggaattcaaactcatctgtgggttaagaaagaattattccatttgatcaacaatccaccttataaaagatatacatttttgagtgacataaattttaaaataagtgcaattttcttgaaattatttcatttggcctaaactttttcatttaaaag

SEQ ID NO: 4363 - DNA, 239 bp, Bos taurus
  Clone ID: 02-LIB34-024-Q1-E1-A5
tctaaagtaagtcttattacaagtgcttcccaggctagaccttgcttgtcctctcgtggggagttttcacttgactccagcgtcgactctcgttgccggtgagatacgctaatgaccccatccttaatctcatctgccgctgtgtcatggatggtttcagacagatgcccagatagaagctctgctgtcttcctgaggcaggagccttatccgtttgtggcattttggttgctagtggc

SEQ ID NO: 4364 - DNA, 388 bp, Bos taurus
  Clone ID: 02-LIB34-025-Q1-E1-A5
gcaacctggctggaggtcattatacgaacaaattcagtgtcagtggatattttaagacctgacgccttccctactgttccttcaggccttggtttgtctcctgtgttagcgggaaagaactccagacactggttctgtatttcatgatgctctgctggtgcactgtttattttgatggcttctggcgtgttaatctgctcagcatcacagaccgcatccaatatagctgcacacttatgatctaaatgaaagggattttttggtatgttttgagcacacatgtttgattgatcatgctgttcatttctggttttcttaaattcactggaaagcttttgatacttttcttcgtcagtaaaatgctgaacgcctcccttaaatccacgta

SEQ ID NO: 4365 - DNA, 319 bp, Bos taurus
  Clone ID: 02-LIB34-033-Q1-E1-A5
gaggcagctctggatccactgcccacatcccgcgcccccatgcatgtctgacggcaatgagaagttccgtccacctgtctctacggctcctggttgctgtcatgcgcagtgtccaatgtctcccacagaatgttgtagaggatgatcatcagacaagggtggatggacacacgtgtcagtccagaaatacccactgagccttaaatcgctactagcagtaggatttcattaagcccatgtacaaatgtcagttcatcttccctgagtgtctccagagtcataagcgtcatgtcaatgggggctcgtgactccagcctta

SEQ ID NO: 4366 - DNA, 428 bp, Bos taurus
  Clone ID: 02-LIB34-036-Q1-E1-A5
agagacgaagagacataagggcaagcctcgtcaatgcatattctacaagcacaatggctgctagattcttgtcttaatctaacaatactgtctagtacggtgggattgcattcaatcatcaagattctggcattcaacctagaagtgtaaatgcagggcatgacgttatcttatctggaagctattcagagatatttcaaccacatttcatttgaggaaatctgcagtggcttttcaagaagatgattttacggaatgcggatgcaaacggcagcattagcttgactcaatcagaaattcaccaactgacagcactcatcagctgtacagcccactgggtgcagccaaccaagctgtagttgactatagcgataatcgaactactcatctacgcaaaagggtcttctacattccagtgacacttcatt

SEQ ID NO: 4367 - DNA, 100 bp, Bos taurus
  Clone ID: 02-LIB34-042-Q1-E1-A5
gtcgacccacgcatccaaattcagacaccataatcgacgcaagtgtcagtgctgcattcatagcctataaacttgccttccagtgacataacatgactat

SEQ ID NO: 4368 - DNA, 231 bp, Bos taurus
  Clone ID: 02-LIB34-047-Q1-E1-A5
cccatgcgtgcacgacaccccccagtcaccagcatctcccgccgctgtacatggtcaggaatgccaacacatgcacggctcatggataaaggtgttatcatccacaatgttcggttgctgatggtgtacaagaaaactgatctgctataccatgcgttctatgactccttccgcgtcgattttacccacatcatcagaaagtcacatcggtgcttcagtccggtctcaaca

SEQ ID NO: 4369 - DNA, 155 bp, Bos taurus
  Clone ID: 02-LIB34-052-Q1-E1-A9
attattattaatacagccttcttgatttgagttaatgtcttgctgcggctttgatttccctgaggatggtgagcatgtgcttagtgcttagcagtcccttgtgtatgttttctgaaaaaatgtctattaaagtcctttttccactttttcactgg

SEQ ID NO: 4370 - DNA, 144 bp, Bos taurus
  Clone ID: 02-LIB34-055-Q1-E1-A5
tttgtgtgaaattttaatcaaaagtggttgagaggttaacaatatactttgaaagaatatctaaaaggttttttaaatgtttgaattatcacatcacacaaaggctgatttctaaaaaaaattaataaagtatttattttgcct

SEQ ID NO: 4371 - DNA, 254 bp, Bos taurus
  Clone ID: 02-LIB34-060-Q1-E1-A5
ggtcgaaccacgagtccgggtttctgttaaatgtaaccaaatgcagccctgataaacctgttcttttcctttacagacttgctctcccctagagacttcacctaccatccactctccttactcttccccctttcctttccatcatctcttaaacttctatactgtgctaagagataatctctaaccttaacggtcccactctagttcacacacagacatgagaacgaattacatctctgtaatgtgttgccaga

SEQ ID NO: 4372 - DNA, 311 bp, Bos taurus
  Clone ID: 02-LIB34-061-Q1-E1-A5
acccacgagtcaacactggtgagcattctcggtatgtgcatggtacgacgacgacgtgcagttcccccagtctcgccgctgcagcaggcaccgtcatactagaagctccaagggcttcatctgtaacatgggaggcgacaaccaccaagcagctaccgtcatctgtatcttcacttcaccgacagcgacgtccactctatcatgacttttttccccgtcaaaaatttccaccatctagcgccactctgcagtcaaccaagggtgcgcgtcacgcaatggcatgttagataacccgggtatctctcgggatg

SEQ ID NO: 4373 - DNA, 198 bp, Bos taurus
  Clone ID: 02-LIB34-065-Q1-E1-A9
ggaagagatagtgaggtgtcactgaatctgtggttcacaaagaactaagaattgacttcggggaattccctgtggtccagtgattaggactcaatgctttcactgcctagggcccaggttcaatccctgatcagggaactaagaccctgtaagccacaaagaagaattgactttggttgaaggaagtggctgtgacct

SEQ ID NO: 4374 - DNA, 97 bp, Bos taurus
  Clone ID: 02-LIB34-067-Q1-E1-A9
gggtcgtcccaaacgtccgacgggtcttggcgtggtggtgtcggtagtgtacccccgcctgggtcctcgtgactggggcggccatgcttctgggtct

SEQ ID NO: 4375 - DNA, 361 bp, Bos taurus
  Clone ID: 02-LIB34-081-Q1-E1-A5
aagattgtcaaaatgcatcgcgatttactataagacatcctgcgcacgttattgttaagagcagtcataaagtctactgtgaatggtgtcacatcgataagacgaagtgcttgcgcatatgctgacgcataggaatgacgtgcacagtaaattggtctagatgctagactgtgtgatcgtctttctctgacatgagcagcgtggagacgaaccgatgactattgtcaacctaaagtgcgacaaattggtgtagcattaccagtatagagtactctctgggagcagaatggtaagcaaaatccacgttttacgagtcacgacgtaaatgctccttgaggtgccttgaagtgaaacatcactg

SEQ ID NO: 4376 - DNA, 358 bp, Bos taurus
  Clone ID: 02-LIB34-082-Q1-E1-A9
cgcgtcaggatctgcattccacagctgatcatatcaggaatgtgcgttcgcatcgtgtgctgcgaatgtcccctgaaaaaggagaaggaaatgtcgtcgatgcagaagcgaatgatcaagtgggatttggtttagaggtcgcgtaggacactttggttatataacaatgcgaattcatagaacgtcttttttaatgccactgatgtgtgatacagattgtatcactctacccgtagtcatgttccagaatcaggattaggtttacagtgtccagcaatcgatgttctcttgctatccagatgtatcactgtctgcgcaacttgactctagctacatcatcacatccacaacatttttg

SEQ ID NO: 4377 - DNA, 373 bp, Bos taurus
  Clone ID: 02-LIB34-083-Q1-E1-A5
aggggtctctgggcctcaggctgagactgagactgggcccaaggggtgatgtctcatgtcaggacaaggggaactaagagggtctccaagcactttgcagagaacaggcagcttgtaaatgggacgagggcagaagcccccagactcaggaagccagcacagtgggcaaggagggccggtgatcgggcatctgaagaggatccaggccctgggcccacgcgagtgtccctcatccctgccaggcataacgggaccatcctgcagcaggcaccctagacagggcacccctctcaccctctgggtggctgcctggctgtccctcaggcagcctgtctttgccagtctgtccacatctcctcctggcctggctgtg

SEQ ID NO: 4378 - DNA, 429 bp, Bos taurus
  unsure (354)...(355): unsure at all n locations; Clone ID: 02-LIB34-084-Q1-E1-A5
tccgacctcggcctcccgcccgcaggcccacgcccgccgcccgcccccggcctgtccaagatggagggcgctccgcgggcgcccctcgctctccggctgctcttcttcgcggccctgccagccaccgggtggctgacgaccggcacccttgagccgccgctcctgccgccagccccgaaggacagcatcagaattaatgtaactaccctggaggatggggaggtgtctaaagaacaggttgttcttaacataacctatgagagtggacaggtatatgtaaatgacttccctgtaaatagtggtgtaacccgaataagctgtcagactttgatagtgaagaatgaaaatctggannacttggaggaaaaagagtattttggaattgtcagtgtaaggatttttagtcatgagtggccaatgacatctggt

SEQ ID NO: 4379 - DNA, 382 bp, Bos taurus
  Clone ID: 02-LIB34-085-Q1-E1-A5
agaggtgccttccccagcctcacctccagatgttccatgggggtttgaagtgtggaggaagagttaacggagcttggtgtctctcttattgagggacatgggcagaagaaccatgaatggagggaggccaacatactccgatctcagctgtcattttgaatttgatctcctctgtgccagaaatcagatttattgctggtgagaatggtgactcatgctcttttgatgccaaccaactaatttatcctgctgtggtttgtgctgaaaaattgctttccggaggatccagtgcttctctagtgcatggaagaattgatgcttttgaactatggccacctgatgcaatgaactgactcactggaaaagcccctgatgctgggaa

SEQ ID NO: 4380 - DNA, 390 bp, Bos taurus
  Clone ID: 02-LIB34-085-Q1-E1-A9
ccgggccgacccaagcgtcagggttagagtcctgggatcccggcaggtctctgctgcttttgccacccaggcccgctccgagcgccatggcccagccaccggccgacgtcagcgaggacgattgtctcccggagtaccgccacctcttccatccggacttgctccaggacaaggtggctttcatcacgggtggtggctctggaattgggttccggattgctgagattttcatgcggcacggctgtcacacagtcatcgccagcagaagtcttcccagagtatcgatggctgccagaaagctggccgctgccaccggccagaggtgcctccctctgtctctggacgtccgagctcccctggccatcgcggcagctgtagagcaggccctga

SEQ ID NO: 4381 - DNA, 397 bp, Bos taurus
  Clone ID: 03-LIB34-001-Q1-E1-A11
agggaatgtcgtcgttcaccagaaccaacacggaaagaaaaagacaagaaaggctgccattgtgtcattttctaagaatcccttgaattttagctaccaactgccaggaaagcccgcatcttctcctcctctccttacagtttacatcacgttggtacctttctagccttagataaatgatcaccgtggtagccttagaccaagaagctggctaatcctttccatgaagctaatccaatggtcatttcaagacagatttaatggaaacactaaggctgcttcaaagattatctgattcctttaaaatgtatatctatatacacagacacattcttttttttttttttaagcttacttttaatagggatgaatcagttttggaatctaagctgtttgc

SEQ ID NO: 4382 - DNA, 212 bp, Bos taurus
  Clone ID: 03-LIB34-002-Q1-E1-A11
cgcgtctatgaaaaactgtcttctatcattctaaaagattgttgatataaaagaagaattaaatttattttgtgcaactttggaaatttaagattagactggaaggaatttctctggcagttcagtggttaaaactttagtggttaagatttcacactcctgttgtagggggtgtggattggaactaagattccacatgctcaaggtgaggc

SEQ ID NO: 4383 - DNA, 436 bp, Bos taurus
  Clone ID: 03-LIB34-002-Q1-E1-A3
gggcggccccacgcgtccagaactcagttttaccattttatcatttaaatagtaagacagtttaagaggataaggcttaaataaagatatttgaaatactttaaattcaagaagttggtgatcgctgggtagcatagttatcccttatcctaacagacaaaaatttgcttgtcagaggaatcagattttaaaatattttcttccagataaaaaagcaaagtggttctttcagttggtattgaataactagtaaaacataccagataccctagaaaaatggttaatcagttttttaaaaatccacatctgtaagtattatgtagttaagattgctttctagcatttgacatgggcagagcacctaactgttatcaccagtttttcaactttctggataattgcatgtgaatatgtgcacatgctgaacaaaataaat

SEQ ID NO: 4384 - DNA, 392 bp, Bos taurus
  Clone ID: 03-LIB34-003-Q1-E1-A3
agcccccatcgtcttagcagtagacgtaactcaccaggggcagtgtatcactcgcgtcaaccctttgagacccaaattggcatcattgttttagaagtttatttctctttcatgtccgtctgagaaagcagtccagagctgctctgaccctcggcgggaccaggcgcccgggtccatcctcctgtgttgctcttccacgttctcagcctgcagcatccgtgtcacgcctgcagacagccgcaccagttagaaaccccctctcagcatttctgcccccttccttgaagagctcttagcaggttattcacaccacacaggcttatccacgcaatcacttgatcctactagcttcaaaggggcatgggaaatactaagtctctatcctgggctgt

SEQ ID NO: 4385 - DNA, 418 bp, Bos taurus
  Clone ID: 03-LIB34-004-Q1-E1-A3
gcggccgccttttttggtgtgtgggtacaaaggcagttacagagaccatgagtaatagagaaaaataaaggtattaaaacactagtgtttccagaatagaatgggagaagacacgagcatctcttgcatcccagagggcagtgtgaatagcccagagcacgttgagaaccatcagcctgggatccctagctctctgactctggctaaggcagcttgcagtggaggtcatgtagcaaagacttgaagacaccagagccagtcaacgctaatcctgttccaccactcgctggctatcctaccgcagccctggtagctctctgcctcagtttttttcctcgggtataatgggattgatatcttacaatgccgtgattctatggtctttttactttttagtagtccgatcatttatagtgac

SEQ ID NO: 4386 - DNA, 418 bp, Bos taurus
  unsure (352): Clone ID: 03-LIB34-008-Q1-E1-A3
tacagaatgggaaccccagagctaggaaatgtagttgtatattttaatgaactgccacccctgctaaagaggcttctttcacttttgtgctctacagaaagaccaaggggggtaggagggacaaagctttgaatcactgctttctaacaccgaatggggccaacaggacagagaacatcacaaatcgaggcaggtgtgaggtgcagtggctgagaattgcctgctccctctgcgtgccctttcttgcctccaaagtccaatcaagtgatcctgggaaagaaatctgcctgggttgaggagggtggttctgaaagaaaaagctaccaacacatgaaagcagggtgaagggtangcaggatgaaagtaactaagtaacctgactcagaactctcaaaagcttctagcagcttgatgacaa

SEQ ID NO: 4387 - DNA, 405 bp, Bos taurus
  unsure (164),(172),(392): unsure at all n locations; Clone ID: 03-LIB34-011-Q1-E1-A3
acacaccaggccgggcatgtgggacacacacggatgagaaacccaaggccttggtctccaccccagagaagacctccatggctatggcaaatgacagtcaccgaaatactaagttggcctgtgaagtcagcttaaggaatctgaagctgatggctccctcctgngagactangggtcactgatgggcatgccaagtaatgcaaagccaggaagacactggaaaaatccagtgaaactgctgcctcctctaccctttgatttactcacccaacttcttggagttattctggagatctacctacaaacccaggaaaaatagatgtacatggcaatttactgaaggactatttgtactgtcaaagtctggaaaaaaagccaaactccatctacangagagagcctata

SEQ ID NO: 4388 - DNA, 405 bp, Bos taurus
  Clone ID: 03-LIB34-012-Q1-E1-A3
ggtcaagcatccgtcttaaacttctatactgtgctaagagataatctctaaccttaacggtcccactctagttcacacacagacatgagaacgaattacatctctgtaatgtgttgccagaggagatcagaaatcactgatgcacacagaggcattctcagggttgccgtattgatgtgtccaaaactgagttcatgactgcttcttactccaacacctcttctatttccattgtttcctttccccatgaacatcaccatccactgattagtgccacctacctcccttcatgtcacctccacagtccaatctgtcaccaagctaaatcaagttccatcatgacattcctacaagcaacaccatcatcttcacctgtcactgtgctaactggtgggccagtcctcc

SEQ ID NO: 4389 - DNA, 413 bp, Bos taurus
  Clone ID: 03-LIB34-029-Q1-E1-A11
gtcgacggacgagtcagatctatggatatgctgtgaaatagtggaagcagggagctgagacccaaagggctcaaataatttaaggttttggcttcacacttaaaatagtaactggaagatgggaactcccttttttgagtaaatttgcatttcatccctcaaagtttatgttataacctagttagccattttctatcatctcccaagaatcaaaaacaaaacaactttgaactctctcttgaaagaaacagtgggcttccataattaaattccaccattatcctcagatcttattttattccagaacttcacaatttgtcttatttaaattatgacccaacagattttaatttcaccatttctatgaggctgatgctaataaaaattaaatcacacagaagaagatttgaaaa

SEQ ID NO: 4390 - DNA, 414 bp, Bos taurus
  unsure (383),(398): unsure at all n locations; Clone ID: 03-LIB34-035-Q1-E1-A11
tgaaaatgttaatatcgtcatcccaaagcttacatttgaattgaagtttctgcagtgactgactgtgtttggtttagttagcactacatgatgtgcgtatgataggttgagggaatattaaccaacaactttctggtctgtttttacttcacacacctcctgttacaagtaatagaaagtacgagcagaatacatgacctcttagttttgaaatttttcatcagaagtgcttgcaggattactacctcagtttataatctacctggtcgttattttttttccatttggtttgctctgagagtacaacagcataaaagttggtcagacttttgcagagctctttttcagtgtgttttgtgcccctctattttaggtaatcatanggaatgcatttatanaatccggtgttacacc

SEQ ID NO: 4391 - DNA, 427 bp, Bos taurus
  Clone ID: 03-LIB34-039-Q1-E1-A11
ccaggcacgcgtccgcggccgcgtgggttcaacatcgaaaaaggagcagatgtgtgacaagtgccctgaaactactgaacagagatgcagtgtgcagtgacgctgcggagcgtccacgacgcctgatgtgcaatacccgccccaaaggcggcacggcggccagccagcagggcagcgcggacgaggcgccacagcccacatggggtcctgaaaggaagaacgctctgtgtgttatttaaaaactaaaaatagaagtttttattgagttctttaagttactaccccatgtttttcttcttactggaaaagttttaatcaaccgttcttaatttgaccaaaattttaaaaaagcaaagatatttttgtaatgtgtcgcagactcgggtgacagaaccctactttttgtacaggaccttcatccgaataa

SEQ ID NO: 4392 - DNA, 301 bp, Bos taurus
  Clone ID: 03-LIB34-047-Q1-E1-A11
gcgtccgcagcgaagcagttcacttctctgaacagtcaaaggacttgtctcagtccgcttgtgcatagacggcatttctataggagatgatgtaactaagtgcccttcaatcctgcattcatgtcggtgaacgcacgttgaggctgaacactcagttatctgaaacacatattcgcttgtgaccgctgagtactcgcataacattagcattctgaaagtttcgaaaggaaagataattttatttctgcaggtatagtcttagtgacaatgaggtctatatggcatctcacgatctattttt

SEQ ID NO: 4393 - DNA, 244 bp, Bos taurus
  Clone ID: 03-LIB34-054-Q1-E1-A3
gacttgctccaggacaaggtggctttcatcacgggtggtggctctggaattgggttccggattgctgagattttcatgcggcacggctgtcacacagtcatcgccagcagaagtcttcccagagtatcgatggctgccagaaagctggccgctgccaccggccagaggtgcctccctctgtctctggacgtccgagctcccctggccatcgcggcagctgtagagcaggccctgaaggagttcg

SEQ ID NO: 4394 - DNA, 395 bp, Bos taurus
  Clone ID: 03-LIB34-056-Q1-E1-A3
gggtccaggcgacacgtccggaggggctttactgaaattatagagcaccagcaaaacaatgcttattgctatactgaatgttctggaagcatttattaatgttattcgcagtcctcttgtcatacttttgtcactgaacaatgccctccctctcgtcttccattttcattcagaatttttagaataccactattcatgtggagctacactacccagtattgtttaatacatttttatttgataaacattcagtgcaggaaactgtgattgctttatgtttatgtatataatcttattctgtggttatcagagttttaatgtatggtacatttgatttttattttttacatgtgtagttttctctcttcacagtcaaacatttatgttatgggggg

SEQ ID NO: 4395 - DNA, 227 bp, Bos taurus
  Clone ID: 03-LIB34-058-Q1-E1-A3
gtttgttgatttttcgcattattttgtcgaccaagtatattgctggctctgggttgctggagaagaagctgaactcagctataccctacaggcctgggcaaagaacacaaaccccattgcagcctgcaaggactctgttaatggatcccagatcacagacaaagccattgcagctttagttaaaaagcatggaaacagagtctccacaaaatagaagtatttggctg

SEQ ID NO: 4396 - DNA, 208 bp, Bos taurus
  Clone ID: 03-LIB34-059-Q1-E1-A3
caggagtctcctccccagccccactcagcctgaacgtggggccagtacagcctctattgagatgtgtctatttggcgccccctggaggcagagtcatgagcattggcgagacactcaggacatccaggctatgcagggccttcagaaacctggtgaaggccgcaggggccttggctgagcatggagcctcctctctggactcaggaaa

SEQ ID NO: 4397 - DNA, 216 bp, Bos taurus
  unsure (8): Clone ID: 03-LIB34-062-Q1-E1-A3
ccggcgtncgacccacacgtccgtttcaggaatcaagggacataatctggtggagggtaacccattagatgaacttctatgttttcctgatcagcttgcattccttctgctctgcccagcttctccccacctaccacctcctcctttggctgctctgctgggtagcacagcccctaactccgcctcttaggccacaaaaatatacatacacacacg

SEQ ID NO: 4398 - DNA, 164 bp, Bos taurus
  Clone ID: 03-LIB34-064-Q1-E1-A11
gaaccctccttggcccgcccaacatccgactccgggacccctcccacacacactaaaggctccgcccactacttaccatgcccctctttggggcctctactctcctgcccttgggtataaagcaaagcagagtccaaggcaatgtccacgcgtttgtgtcgggc

SEQ ID NO: 4399 - DNA, 230 bp, Bos taurus
  unsure (147): Clone ID: 03-LIB34-065-Q1-E1-A3
cgacccacgcatccggtgagaactttgactctgagacaccagggtagggtaagaagaggagtgacataatttgactagtattttaataaccccccctggctactatgttgagaatagatacttaatctttcaaggcctcagttctcncagctatgaagtggggagaataatcatccaaatgtctcagaagatcgctgcgtcaatgtaaggagacagtacatagaaagtgc

SEQ ID NO: 4400 - DNA, 149 bp, Bos taurus
  Clone ID: 03-LIB34-066-Q1-E1-A11
aggttcagggaaccatctactatgtgactgattacggcatcaatgaccgttccgttgggcatgtcacattccatgtccaccacgatcctgactacagcatccgccatcatatcatggacattgtcacaggcctgtagacgtcccggtcc

SEQ ID NO: 4401 - DNA, 232 bp, Bos taurus
  unsure (173),(193)...(194),(221)...(222): unsure at all n locations; Clone ID: 03-LIB34-070-Q1-E1-A3
gactagttctagatcgcgagcggccgcccttttttttttttttttttttttttactatttagttctctgaaaactttcaaatttattaatgactagagtgccaaatcctaattaaataaatgcaatttgcaatataaaaaaaccaaacctgttactgtatacatgaactcatnatagactaccaaaaatatannctaaatatagaaaataacaacttttgnntccttgttta

SEQ ID NO: 4402 - DNA, 406 bp, Bos taurus
  Clone ID: 03-LIB34-071-Q1-E1-A3
gttctagatcgcgagcggccgcccttttttttttttttttgcctgagaagctcaagtggtatttacaattaacatgaaatcactctgcaaactgtcaagtgtaagaggacctgagggattactactgcccccccttcccaccccccaagccagaaataattagacggcaggaggccttcaggccccctaacaccccacaaaacacttccttgatctgtgacagtgacttctgtcaggagatgagttgagcagctcctgatcttgctgggctttgagaattatgggggtcctcttaacctgggggttgctcgtaaggttccttattcctggcttgaaggcacttggtcaaactcacaccaccaccaatcaccagcaagatcaggatgagagagataaccatggccgt

SEQ ID NO: 4403 - DNA, 58 bp, Bos taurus
  Clone ID: 03-LIB34-072-Q1-E1-A11
ggttgctcgcgatctaagaactcgatccctagctgccgcccgttattttttcgttttt

SEQ ID NO: 4404 - DNA, 400 bp, Bos taurus
  Clone ID: 03-LIB34-080-Q1-E1-A3
ttcaagggtgtctgtgttttttctcagcctaatagatttgctttctaattggcatattgagagagaagaaaggctcgtttattgtctgccctttttccactgtgaactctgccatgaatgcttctaggagcagctcctcctggttaactccagtgtgtctgactccctgactacaattttggtgtcactggtctgaggcacatgggctaccacttgaggatgggtagtagaatttgagacggggttggtgatacttgtcaagtcttctgaaatacgtatcattccttgtatgtaatgattttgatatttagacttctaaagtgaactaagaaatcatattgtttaaagtgtcacttatgactaaactatgctttattggtcctttaaattgcatatttat

SEQ ID NO: 4405 - DNA, 343 bp, Bos taurus
  Clone ID: 03-LIB34-084-Q1-E1-A3
cctccgggcccgcccgcgcgcggggccgcgtcccgagcgtccgccctatctgctgcagcctccgtgtccggccggccggccatggaggccgagcgccctccggtgtccggcccgggcttcgggcgtcccccactccgcaccgtcggccgggaccccggcaccgcgcccgtgtcggtaaccgcgccgatgcagggccctgccggtaggattcgcgatgcgtcaagagcctgagctgtcgcagccgcggaacctctggagcccctatgggccgggggcggccgaggcctccgaacacgcgtcagctgcagatcccatttgcctagcgcattagaaccccccccag

SEQ ID NO: 4406 - DNA, 410 bp, Bos taurus
  Clone ID: 03-LIB34-086-Q1-E1-A11
ggccgacgcccgcgtcaggaattatctggtggtccagtgattaggacttggggcttttactgccaggcacccaggcttgaacctggttgggaaatcagatcccacaagtcatgaggcatggccaaaaggaaattatagattcactgcacaaatctttcctgaacacccaccaggtgttcggccctcctgaagcttgcttcctagtggggagagaaagaaatggcttcaatgagccctaggtgctgaaaagtgcaatagaggaaaaataaatgaaaaaaaaggaaaatagggaataccagtatctctgacaaggggagcccttcctgagaaagtggcggtggaggggacaccatgcagatgtcttcctgtgaacatcatgatgtcttcacgtgaacatcgcatgcaatccc

SEQ ID NO: 4407 - DNA, 401 bp, Bos taurus
  Clone ID: 04-LIB34-009-Q1-E1-A7
gatggaaacagccagccaactacaccaaaaatatcaacacaggaaatgaaaagcaaaccctcacaaggtgatgcttttaacagtcgagttcaggacctcatcagctacgtggtgaacatcggtctgatcgacaagctttgtggctgcttcctctcggtgcaaggcccagtggatgagaatcccaagatggctgcctttctgcagcatgccgcaggactcttacagggaatgtgcacgctctgctttgctgtcaccggaaggtcgtacagcatatttgacgataatcgccaggatcccacagggctggcagctgctcttcaggccacagacctggctggagttctgcacatgctctactgcgtcctcttccacgggacgatctcggaacccagcactgcgag

SEQ ID NO: 4408 - DNA, 422 bp, Bos taurus
  Clone ID: 04-LIB34-012-Q1-E1-A7
ttcgccggtcgacccacgcgaccgaagatggcaaactgatatttaaaggcagtagaaaccccttgaaggcttttggcaccctcactcacttgagcaacccaacctaggagaagtttttcccatccttctggcagctcccaaaagtccaagagagccagctctgagccagttcttcatttgagactcagtgagaatctgcagagaagtgacccttctgcggggcatgcttgctcagggtacctctgccagaagggagcttcctgacgccccagcttgagtcccaggagcctctgcgagcccctaattgcactctcattgcattagaatttcacgttgactgtctctttgttaaaacttgccatgtccttcgagtaggagccaacatttgttgaatgctttcagtacaccaggctcagtccaag

SEQ ID NO: 4409 - DNA, 408 bp, Bos taurus
  Clone ID: 04-LIB34-017-Q1-E1-A7
agaggatccaacctaactggaaaaccagccagtcctcataatggacaagatccaccagcccctcctgtggactaactttgtggatatgggaagtgaaaatagtttaacaccttgcacgaccaaatgaacgaagatgaccagagtactcttaaccccattagaactgttttttcttttgcatctgcagtatgggatggtattgttttcatgagcttctagaaatttcacttgcgagcttatttttgcttcctgtgttatcacctttcctatatttgagtaaatgattacattaaaaagttacatggggcttttttggttatcctgaacttaaacattccattcgttctgtttgtaactgtgatcataatttttgtggtaatttccggcctgatagaaggaaatttgaga

SEQ ID NO: 4410 - DNA, 359 bp, Bos taurus
  Clone ID: 04-LIB34-019-Q1-E1-A11
aaatatttccttacatactgtgataagttgttgctgtattacatgtaataacatgccttaattacatttaatgccttatataatttttagaattaagcattgttttagatagtccaataggattcataacatacgctgtataaaattagcctccaccttcactatcaagcacaagttaatgggatgaaaacattttcagtctctctctgaggtctgttgcagaaaagcaggggtaaagagaccattagcattagcagtaacagacatattgctttattgatcccttagcctctagagtttttcaaagagaaaatgttcaacttagattctttttccctgaattagagcatctccgggga

SEQ ID NO: 4411 - DNA, 69 bp, Bos taurus
  Clone ID: 04-LIB34-024-Q1-E1-A11
gtacatcacaacacactatattgagtcgtattattcttttttttttttttctttttcttttgttccttt

SEQ ID NO: 4412 - DNA, 326 bp, Bos taurus
  Clone ID: 04-LIB34-025-Q1-E1-A7
gtccggggagacaggcagagaggagaggactagtctacaggccttaaagtatattttcttaagggagttaatgctcataactggggaggaaaaatctgcctttcccaggttttttcttccagtcccttgttcctggtcatctcctgcagtagagaatgcagggggagccctggggagaggcagaagtggtggagagcttgggtcgggcatgactgagcagtgtgggaaccaggaagggctcctggacgcctgcttggcacctagcccaacccgggttcctagagagccactacaggccaagtagttgacagtcctctctagcactg

SEQ ID NO: 4413 - DNA, 393 bp, Bos taurus
  Clone ID: 04-LIB34-028-Q1-E1-A7
gggcacaggaaggaaaatggactgagcgtggacttatgtgccagcaggcgggggcccaggcagcacgagtactttggccttcctggcctgggaagtccctggctggcccccagggagaggggcaaacacctccagggactgacactccaagcggcttcacctctcctccagctccctcctccacaagatttcattacctcccacctgccattcacccatcaatgtgaaaatcagggtcacagccggtctgtgcatccggctccccagaagcccgttctgtccagcagcccacaggccccttgctccctggtcacacgagtcctggttcaattcgcttgaccccctttgccctcgtacccttttctccaccagctggtggagtgagggcccagg

SEQ ID NO: 4414 - DNA, 241 bp, Bos taurus
  Clone ID: 04-LIB34-030-Q1-E1-A7
ctgacgcgtccgcaaatgtgaaacaagtaatggctctcattagcaagacagtgtgccgtatcgattgggatctcagtcccgtcctggtgagtcggcactgcctcagactgcctgagaatcgaacatggatcatcagagacattacggttactgagtgccgaatcctttgggtctagtgatcatgaacgttgccatggaggctgcgtgacgctgtgatgaatgagcgcatatgtgggatgtg

SEQ ID NO: 4415 - DNA, 407 bp, Bos taurus
  Clone ID: 04-LIB34-032-Q1-E1-A7
gttgtcattgtttgacttcaatagaatgaaacttgaaattgcaattaataactgctactcatttaaacttttttttcattactactaccagtttcctcaaagtttattggataaagcaacttttctagataaatgctgcataaatacagcacttaaatgaattattcatcttcctagtatcaggtacccacttaatggatggtaaatactttttgtaaagttctaactgggaattttcagatgctttgaacttgccacatactctagcagttccctggaacatcaagacaaaataccaatgttctagaaagaatttcccttcattgtttttcttatcttcagcttaaatttagctgttgtccaattaacctaaaactaggttaattgggaagatggcagagttttct

SEQ ID NO: 4416 - DNA, 306 bp, Bos taurus
  Clone ID: 04-LIB34-034-Q1-E1-A11
acaggtccaggactcgcgggtcgacgcaagcgtctagactgcgtcgtcttaatctgagctggccgcgtcctgcctgctgcgctctcccgggccccacatcagagccgtgcacattcagatctggctcagctgagtgccagcctgcaagaggaaccgggaatcgtccacagagctggcacctgcaaaagcagagcgggacagcaggtctcgacatgagcagcacatccaccttgacagcgctccaggacgaactattaacgtatgtaccaacaattagctgcgcctgaacaactatcctgaggtcat

SEQ ID NO: 4417 - DNA, 347 bp, Bos taurus
  Clone ID: 04-LIB34-034-Q1-E1-A7
ctttcaggagccataggccacagtgatttttcttttcccctgtttaattaggcaatacccttgttaattgccctttggcaactaacttacatgtgcttccaagacactaaatcaggaaaaccaaaagggcaatatttttaacttggggcacgaagaagggaacagcagagaattgactagatttagcacctattaaaggagaaattcttgcttcttccaagatctttcaagccatgccttatgtgtgtgccagtggacttgctcaaggatggggctcaagctgagtacccaggctcagcaacctcttcactggaaccggtggtggcatgcaacatcagagcctctga

SEQ ID NO: 4418 - DNA, 428 bp, Bos taurus
  Clone ID: 04-LIB34-035-Q1-E1-A7
cagacgcgtgggttgtgaagtaatttctgagcagaccaagatctttgggaatgaacactaaagatgttttgaatgaaccatagtccactggcattttagtgtttttctttttttttttttaagaaacaaaaatcacacgtattgttacattcctgcatgtccttttctgatagccttagtgggtccactggatttttcttttcccttttgtgatgcagcttttagtcttacctgcatatatgtgtttttcagacagtaattaataactattgatgagatagcagcacttgtcatggcgggattttaatatatcttatcagtaattaacactatgtcagctgacttgtgtacactgcatgaaacatgaattaaagccactaagagtgccttgtcttaaggctctgaaaaacactgatgggatcatcatt

SEQ ID NO: 4419 - DNA, 352 bp, Bos taurus
  Clone ID: 04-LIB34-037-Q1-E1-A11
agtcgtattattaaatctatatattgactttgttatcagtcatcttactgtgcaatcgaaatgatcaaaattagagttctttggtttgaaaacaacacttagagccgccaaataactttctaagagttatttagctttgtgggtgatattttcatgcaaataagtaagggtgggttttatattttgtagaagtttttggtcctagtttaatgctctttgtatggcagtatgtatatagtgtgttaaattcctcaagaccctccttgaaaactttgaagttaatacttttgtacaactgtgttttgaataaagccatgacagtgttaaaaacaaacgtaagagattagtactg

SEQ ID NO: 4420 - DNA, 390 bp, Bos taurus
  Clone ID: 04-LIB34-038-Q1-E1-A7
gaaatattctgttgcctactggactacatctacaatgcaatattcattcaatcacatgtttcatttaatactaatactccggaaactatgagtcgactatgaatatacactaaaggcattcatcctgaagttcggatgatacattggtgcacatcgatcatattatctcgcatacagatgcatactcaggctagagtctcatgaataacactatcaaagagatttccacaagtcagatgtaatctgttgactgtataacattagtcttataatctttgattctcaatcaactacgatctacaactcacacatctatgtataagccatgactatggatctggcacaagattggctgaccgaagaacagatttacagtcattgaagtcacac

SEQ ID NO: 4421 - DNA, 369 bp, Bos taurus
  Clone ID: 04-LIB34-046-Q1-E1-A11
agcagacgcgtgggtgagctgatccgcacttgggaaaccgcacgaaccttctcctaggacttcgtcggccctacgtctgctcagcccagtggctccgcgcacctgccaccatggagctgcggcctcgtctcggggccacctgtttgctgggcttcagtttcctgctccttgtcacctcttctcatggacctaatgggcttggaaagggttttggagatcacattcattggaggacgctagaagatgggaagaaggaagcagctgccagtggattgcccctgatggtgattatccataagtcctggtgtggagcttgcgaagctttaagacccaaatttgcagaatctacaggaatttcagaactttccc

SEQ ID NO: 4422 - DNA, 240 bp, Bos taurus
  Clone ID: 04-LIB34-054-Q1-E1-A7
gactcctttggggggatcaaatcataattcttcattatgcagtatctttcttttctccagtcctcacagatacagaaacagtaactaaaattaacttttccttttaaaaaaaaaattatatattcagtttgcagtagacattccttaagtaattggatttaattatgattatcaatttacgtaacattaatattgtatcagacctccttatgaaaatgagtatggatgtacacagtatgg

SEQ ID NO: 4423 - DNA, 348 bp, Bos taurus
  Clone ID: 04-LIB34-055-Q1-E1-A7
cctttttagagcatgttggcaggagttcagggtatgagagtaggttagaaaggcaggcagttatgttctgtggtggagaatcaataatgtctaaaattacaaaacaggaaataccaacataggcttataaagataggaaattctgaaaaaatctttgcttcaggagaaggtaaattggttgagggggagggacacgaagaaggagacgttactgttttccataacaggtcttacagagctgtttgtgtctttaaatcaagaggatgtataactttgattaaaaattaaagccaatgaaaaagaaaatgatcttggagaatcaagtgcttgaaatcctccacttcttga

SEQ ID NO: 4424 - DNA, 206 bp, Bos taurus
  Clone ID: 04-LIB34-059-Q1-E1-A7
cagagcttgcctccttaccttaccgcgaggcttgaatgaggtgatccaggcgacaggctcagtgctgggcgcacttgagccatcagtgagtttttacagtcatctatttattcttcaccctctcatagccaaaactgaaagctaaattcctctttggcatcagagacgtgttattcaaggaaaccacattagtgagagctggatgt

SEQ ID NO: 4425 - DNA, 169 bp, Bos taurus
  Clone ID: 04-LIB34-068-Q1-E1-A7
ggcgaggcggtgctgaagacccagggcccccaccagggaccttgctaggtggggccacatgtgtggctgctgggacggatctgcctcgtcactgcacccctctgccagggataacctgagggctgaacccctggcactctcaatcctcccgctacagaaaatcaaccac

SEQ ID NO: 4426 - DNA, 214 bp, Bos taurus
  Clone ID: 04-LIB34-072-Q1-E1-A7
atgcacgcctctatagtgagtcgtatcatcggccaggctagcgcgaagctccctccacgatggctccttttctgtattttcagggtgtaggcccagtttccaacggccgatcaggacggagagcatgccggacccaacgtaggtttgggtgccctcggtcagcggacctatgagaagaagctcgcataggcgcgcactctgacacctgtgccac

SEQ ID NO: 4427 - DNA, 359 bp, Bos taurus
  Clone ID: 04-LIB34-080-Q1-E1-A7
aagccgtatccagtctcgctgtccgaccgtgggtctctcggtcccgatggcaggttggacaaactgcagcccctgggcctcagccaccaggactacttaactcatcacccggccgccacggcccaactggagaccgcactacacggtcacagttaactgccggcacgtcgttactccgattcccacgagctgtcacagctggtgtactccgccgctaatctgcttatgctgcccagtgagggaatcctacggaatgaacttccgtaaacattatgcatgtcactgtcccatcacaagctactgacatagctgagcgtgctgcagtgtttgcacgtgttcatggagactcgggccaacaa

SEQ ID NO: 4428 - DNA, 134 bp, Bos taurus
  unsure (65): Clone ID: 04-LIB34-082-Q1-E1-A7
ccgggtccaaccaacgcgtccagcctctggccgcaacacagcctgccttacgtactccagtgatngtgtaaccagaaattgcccaatccccatgggtaagggcctacacaccacaccttacgtcccgacactgc

SEQ ID NO: 4429 - DNA, 398 bp, Bos taurus
  Clone ID: 04-LIB34-083-Q1-E1-A11
tgcagttttaatagatccatttttcatctatgcctcttaaaaacttgtatgcttacgtaaacatacttaagaggtcatttttctttaacagatttcatttcttttcttttcatttaaaggtggacaaagctacctccctgagagtaaatacaaaaagaacttatttacacagggacattttaagactgttcttaaagtaaatctgctggccacagaatgtcagcaagtacgcagtgtgagctagcaattagagaccaagtttaagcagatggctgtagtccaaaaaagagacagattacacctatgcaggtcaacatttggaagctctctcttgcttctcccttttttgtcagcccataacagtgctttcttaccttattctgtttctgatatagatt

SEQ ID NO: 4430 - DNA, 392 bp, Bos taurus
  Clone ID: 05-LIB34-006-Q1-E1-B9
gttagttttcctctcttaagaacagacctctccaacaattaatgttctggtatttcatcctatttgaaatgacctggatagcaaatgaattctcgtaatttaatttggtttaatttctagttaccaagatctggagatacctcaccacacagtttgctggagctcagtgaaagcgccaagtcccaaccactggaccatcagggaattcctggctcagtttctctcattgacaccgtcatgagtgcttgaagcaccaggcaatcagcctctgtcatgcccccagataagcagtacttacttgatgatcacagtggggtttccttatgggacggctacaggtcatgaaaactgatcctacgacacttctgggagatcctctgtcatctaagagt

SEQ ID NO: 4431 - DNA, 400 bp, Bos taurus
  Clone ID: 05-LIB34-009-Q1-E1-B9
tcttaacccagctgacacactctgagtaaatcaggaacacgtcttgtctgcaggcatttctgatggcttcagctaggctccactcttgcctgcagtttggcgtcgaggacctcaagactgtggtggcactgggcgtgtgggggtctcacaggccccttgggggtgaaggtcatggcagtcacacagggcactgctagcaagagtccacaggctgtccaccgcgtgcagctgcagactgggcagcctccgaccacaacgatggaattggcagggtaccgggtgacattccgactgtggatgttgtagaccctggggtggtgggtgggtatccctgtgacgaggtacgggtagggcggcggccgggcggcggccatggcgccgtagccgtgcggggcgcacg

SEQ ID NO: 4432 - DNA, 76 bp, Bos taurus
  Clone ID: 05-LIB34-010-Q1-E2-B1
tgagaatttttcagtgaagtacctaaggagcattgccttttcatcagattttaaagataataaatacattaactat

SEQ ID NO: 4433 - DNA, 159 bp, Bos taurus
  Clone ID: 05-LIB34-015-Q1-E1-B9
atttattttggacctgctgtgatcttgacaggaaatgtgccacagagctgtagtgcagaggcaaacttgttaatgacgtcttttggacaaaacggtccggaggttccggcattccttttaaattgaccggggggtccggggggcctggctggtcaaaac

SEQ ID NO: 4434 - DNA, 53 bp, Bos taurus
  Clone ID: 05-LIB34-017-Q1-E1-B1
acgaaaatagacatgaataaaatgactaagaatgtaatcaagggaatagttgc

SEQ ID NO: 4435 - DNA, 404 bp, Bos taurus
  Clone ID: 05-LIB34-018-Q1-E1-B1
taaatataatttgtcaaaaggaatagagaatggcagtagtcctatatttattctttaaacttaatacttttaaaggaaaaacgttactttttgctaaggaaattctatttcctataaacagtttaaagaataaatataatttgtcaaaaggaatagagaatggcagtagtcctatatttcctgtattaatgcaatagaggttgaaattcctgaagcaatgagaaacctacaaaactcaaatttagagctttaaaatatgacttgaaaagtaatagagaaggacaaatagaacaaagttctgtttctcttgacacaaaatattttttgctaataaagatggacagtgcttccttggtttaaaaacattttgttgatttgccagcattttttaaagttaaggcact

SEQ ID NO: 4436 - DNA, 106 bp, Bos taurus
  Clone ID: 05-LIB34-020-Q1-E1-B9
gttctcactcgcgagcggccgcccttttttctttttttttgctttttgtcggagacctgtttatcactttgtttaaacgtaaattttcccccatgtcctttgaaac

SEQ ID NO: 4437 - DNA, 100 bp, Bos taurus
  Clone ID: 05-LIB34-020-Q1-E2-B1
aggaactgctctagggaccgctcttgagctgcatgatccgtgcgccccgtgacccagcagtctcccgcaagctccatgtgcctgaattaccgggttcgtg

SEQ ID NO: 4438 - DNA, 325 bp, Bos taurus
  Clone ID: 05-LIB34-025-Q1-E1-B9
gagaggcacggaggcaaaggacgtgttcagatcatctcattcctctggcttcttttttttccaagagcagggctgttctgctgtcccaccatgatgcgggctgtgctgctcctttgctgtgtcttgatgtccccagtggctgccttcccaagaaatgcccaggaaggggtcctgaccttccagccatctatctcagaaattgggcatcctttgaacctgctctccaaccagatccttctaccagaccctaaaacttgccaagatctcttgcatgtggccccctccttagcccctctgcctgagtacctatccaacttagctctgg

SEQ ID NO: 4439 - DNA, 329 bp, Bos taurus
  Clone ID: 05-LIB34-027-Q1-E1-B1
caaggctcacgtctaaagtttcagcatggggatgatgacacgcagaattgaatcagacagctaggagaggtactcctgccactgatcaacaggtcagtatgaggagtgtccagagtttccaatactggatgctatccttgatcatgagactggtatctagaggtgtgggcatgaccccaatgtatgaggatgagattaagagtccatgttacatgaatggagtcctcatcatacgaggatccatcttgtatcacatcgcagggcatttactggtctacttgtgtcgttctgacatgcatccatagcctacacatcttcacagcgtcaaa

SEQ ID NO: 4440 - DNA, 300 bp, Bos taurus
  Clone ID: 05-LIB34-035-Q1-E1-B1
cacgcgtccgcaatgctagcaattagcggaacgatgataacctgccctgagtcattattatgcgatcctgaatgtgtcacatagattgcttgtttaatcagggcagatcatcattatctgcttagcatgagcctcttacatttccgttcatgtgcttccagcctgtcacctggtgacaaaagttcaactctgctgaagcatcaggtctgatgttcgcattgcttgaggggacaatgtgtccctccaatctaacatatgtacttgcaactctgatgtcacagtacatctaccatggacaca

SEQ ID NO: 4441 - DNA, 430 bp, Bos taurus
  Clone ID: 05-LIB34-035-Q1-E1-B9
gtcacgggcctacccacgcgtccggggattttccaggcaagagtactggagtggggtgccattgccttctcctagctaatggtaatttacatttgtataacattactcaatttttagtctcacaactgccaagtggatgtttctgggtattagaaagatcagtgttggaatattgattattgctaaatctttctactgaatttttaaaatccattttagaagtcagagtacacttttttttcatggaataggtggtcagagggagcacctttacttcttttggtgaagttgaaccataattagaagtttgcagtttgcctttcacaaatgtcagttggaagccgtttgtatcttgttggttatttgcaagaagagaatgggaaaaaaaagtatcaaaatatgactttgaagtgtatataatttataagtg

SEQ ID NO: 4442 - DNA, 436 bp, Bos taurus
  Clone ID: 05-LIB34-041-Q1-E1-B1
ccgggccccccacgcgtccacaaataggtactttggaaggcaagccaggggtggttacgaggccagggctcggctggagaggctttcggcaagttcttccatcagcgcagctgacctgttcgatgagcagaggaagcacgcggcaggaagctacaacctcaccagtgtgctgcccacagctcccgacatgggccagttcaagcagggagtgaagtcggttgccggaaagctctctgtctttgctaacggagtcatgacttccattcacgatcgctacggttcctaacactgatgttttcggtgcgtgtttcctggagaaattcctcttttcgtgaaccagtgaccacatcacacgctgcagtgaagaccaactggctttgggcagattgttttgctactttttctcgtggtatatatgtattcatgggtgaatttt

SEQ ID NO: 4443 - DNA, 285 bp, Bos taurus
  Clone ID: 05-LIB34-043-Q1-E1-B1
gtgaaccctgggagctatggagctgcaagtagtggcacttggaaccccggctagccctgagccccgtcgtgctggtacctgtaaacactgttgcccccagcccagaatttgagggacgtggaaaccatgacgggtcaaacctcgaagtgatggcatctgaaacagcagtttctcagaccgcagaactgttaggcaatgcaataccggacgccccaaacccagcagtgcttgcactttgaatactggtggcactacatactgccattttacgccaggggtcctcaa

SEQ ID NO: 4444 - DNA, 339 bp, Bos taurus
  Clone ID: 05-LIB34-045-Q1-E1-B1
aacagatagagtgtttgcaaaacattcactatggagcatccacttcatcctgaggatgcattacggattgggtaacaaagcacaatctctccctcaaggactgttttgttttcatggaaaaattcagacattacataaacagagaggatgatataatgtcacgtacatatcagcagcttcagtcattatcaacatggggccaatataattattccctacgtcctaacccctttcctcttttgggtttgttttgtaccaaatcttacacatcctgttattttaagtctaaaaatttttaatcatacttaagatggcatatcacacctaagataaacataa

SEQ ID NO: 4445 - DNA, 291 bp, Bos taurus
  Clone ID: 05-LIB34-045-Q1-E1-B9
cctttctttgctcctcatgttctccaaacctctgaataaggtgtttgcagatgtagctatacactataatacacatgccacatacatgaagacctgtggtctccatttataggcttgcatgcatacttccaaaacactggtttgaagaacatgaagagcaaagaaaggaggtgaaataggacgaaaagctcatacaggattcgtgagtttcctggaggcatcagcaccgccttaagtaacgcaacacgtcatgggcagaggtttctagaagttcgcagtgagacagagatg

SEQ ID NO: 4446 - DNA, 148 bp, Bos taurus
  Clone ID: 05-LIB34-046-Q1-E1-B1
attcaaacgaatgttgggtacacagttaatatcaactttaaatccaaggccatctagcccaattcaagatatcgcatgaggtgagaacagaaagttctaccagtgactcccactgcaacaagtgatactcgcacttacatagggaaaa

SEQ ID NO: 4447 - DNA, 422 bp, Bos taurus
  Clone ID: 05-LIB34-049-Q1-E1-B1
agaatctctacatgaacaaaagaaatagtaagttaggtacttttcacttaatgaacacttggattgttaagggtagtaaatggggttaaagccttgctattttatgtatcgttaccacataattgatgaacattatatcaatacaatcattgtatcgaagcctctgtttaaattacttaataagctttatttgtaatgcaaactgtttagaatccatacacagccaaatcaaagatactatataattaatgaacagtaaccaagaaaaaatatttttgttgcactactaaagatggactgcatgtaatttggtatggtgtgactagacatagcttgtaatgcatctaaattatattttcctccttttattgtcagcttctgataatgaagaaattctcctaaaggatgagatatatgaaatc

SEQ ID NO: 4448 - DNA, 241 bp, Bos taurus
  Clone ID: 05-LIB34-052-Q1-E1-G8
taaaatttgctttagcattattttcccctgttaaataacactatctcaccaggagattcagattcaacaagtcttaatacatatgaagtgaccattacagtggctgctaaggtaaatgttcagcaaagttaattattacttttaagtggcaaaagtccaactccaactgtctttagaaaaaagactttaagggttcatgtaactgataagcctggggcacagctggactgagaagtctaag

SEQ ID NO: 4449 - DNA, 243 bp, Bos taurus
  Clone ID: 05-LIB34-054-Q1-E1-B1
cccgatggagccaggccactgtcctgggcctctcctctgctctcaggtcctctcagaggcagatgcccagaggggctgcggtcgcctgctcctaggttccgtttcattcccagcctctggcttggggtccctggagaggcggtggcagtggtgtcgaggaagggcattctgcccccactgccctgatgtggaaaggagtgtgtctggtgtagtgggccagcaggtggaggggggtgtggggac

SEQ ID NO: 4450 - DNA, 394 bp, Bos taurus
  unsure (8),(357): unsure at all n locations; Clone ID: 05-LIB34-061-Q1-E1-B9
cgtaaaanagttgtttttctgctcctttgctgttgtgaccaggctgcattgacagagcaagttggatgataccatcaggggctcttgcactctccatttgaatattgcataattaatagtgctctgcttctaaggatttgaatggagtcttagggtcatcttgtcctgttggaatttgctatgcagagccttaaacttcccattttgttaggatcagctaggccagtaggaatggaccaggaccttgtctcacactgatgatacctcagatgttggctggctatgtgaactgcctatttcctgtgccgagctgtttttgatttttaaataaatgaaaatctgtagattctctcctcncctgtcccaaaaaacaaagcaaaataatgctttttga

SEQ ID NO: 4451 - DNA, 213 bp, Bos taurus
  Clone ID: 05-LIB34-062-Q1-E1-B9
ggcttcttttttttccaagagcagcagggctgttctgctgtcccaccatgatgcgggctgtgctgctcctttgctgtgtcttgatgtccccagtggctgccttcccaagaaatgcccaggaaggggtcctgaccttccagccatctatctcagaaattgggcatcctttgaacctgctctccaaccagatccttctaccagaccctaaaactt

SEQ ID NO: 4452 - DNA, 63 bp, Bos taurus
  Clone ID: 05-LIB34-068-Q1-E1-B1
ctaacgggcgccccttttttggtccttaaaacttttggctttttttcaccaaaaatcttttaa

SEQ ID NO: 4453 - DNA, 229 bp, Bos taurus
  Clone ID: 05-LIB34-070-Q1-E1-B1
gcaaggcactgacaccagactctgggaggtgctcagcaagctgaccttttctggttgctgcccccaaaagaacaaaataccgcctcttaagctctcgtgtcattaccaccaaggtttaaggtctggacaggatttgctatgcccctttttaaagcttttggattatttgaatgtagtttaagctattggctcctaaaattctctaatcacggtctaggaagatgataaa

SEQ ID NO: 4454 - DNA, 234 bp, Bos taurus
  Clone ID: 05-LIB34-080-Q1-E1-B9
cggacgcgtggggtaataacatttttatatatcatgttatcacatgtggaagaataatactctgtgtgaggggtactattcttccacatgtaataacatttttatatatcatgttatcagaaattttttttcataccttatatctctctaaagctatcaaaatgtagttggtgtgagttttcagaaaaagtttttaggacaaatgacattaaaaacagcacatggttttctttc

SEQ ID NO: 4455 - DNA, 440 bp, Bos taurus
  Clone ID: 05-LIB34-081-Q1-E1-B1
gttctagggtcgaccgacccgtccgacaaattataaacaaacatggaaagctacttagggggaagtaaatgtggaaatattttctgactttaacgtgccctcttaccttaaaacctccctcatgcattatttctgaacccccttattgttgttaagaacacggtggttgtgatgttttcttaaaaattgattgtcactgtgattgacatgtagccccagcctaaacacagatgatgagcattgacagagtattgtgtagaaagagacagaaatgcaggaatcctgctcagccttcctgtgtgggtgctaaggagagaaaatgccatcaactggaaggccaggtcccactgagaacccatggggttgggatgccagcccacatgcagacaagcaatgaaacatggtaaactgtattaaaccttatagaaggtccttttttc

SEQ ID NO: 4456 - DNA, 70 bp, Bos taurus
  Clone ID: 05-LIB34-083-Q1-E1-B1
cgtcagatagtactagatcgcgagcggccgcccttttttttttttttttcgttttttttttggctttttt

SEQ ID NO: 4457 - DNA, 66 bp, Bos taurus
  Clone ID: 06-LIB34-002-Q1-E1-B5
atggattccatcacgcgctcatagttcgttacatcacgaaagttccctcaactgtcaactccaact

SEQ ID NO: 4458 - DNA, 349 bp, Bos taurus
  Clone ID: 06-LIB34-004-Q1-E1-B9
attctatttcaattcaaattatttcacatatgccgctgactgtaggtaaaatggacccactcttccagaataaggcatctttataaagcccaggaagtcaagtaacagaaatgatttttaaccgtgatgaggttatgggaacaaagctctatatgctcttctctattaagtaaaatctttttagctctctctatttctgccagtaagattgattctacaggtctgtttttttgcttataatgctgattagtgacattctagacctatccttaaaactgcaagtttccataattaacagagatgtctccatttctctgcaactacagttagagatgtgtccttgtcacac

SEQ ID NO: 4459 - DNA, 368 bp, Bos taurus
  Clone ID: 06-LIB34-011-Q1-E1-B5
acgatttcatttggttaaatctgttggatgaactgcctctttcttttcatggggatttcctttctgcactttttcttcctgctctagtctggtttgcctggtgcttaggtctgttcaaactcattgttcttttgtgctgtgttgcatctcctgcttcctgattttcatccctcccttttttctgctttacttccttgttttgctggagcgtatcttgcagtagcattctatgaaagggtacacggaacgcacattttattgaggcctcatatacctgaaaatgcctttactctaccttcacacttgactggcagtttggaaatgatttgaaggaattacaatgccacctcctaaattccagtgcagct

SEQ ID NO: 4460 - DNA, 343 bp, Bos taurus
  Clone ID: 06-LIB34-019-Q1-E1-B5
aacattattcgagatctgtgcatctctggctctcagatagtcccagccgttctcccagccccctccctgccgggtcctgatggcaccagggttgtggaccgcatggcacatggatctctggaagaagagatttttgatgtggatggaaagattgaatagtattttgcttttgacagacgtctagatggcgaggattgtcttgaacaatgagcagctcatcgtcgcatgacttggcgtaagcacatacttcctcccgtgtctccacacgactgtattagagatgcggtggctgcacaagtgtttgatcacgtccggatgaatgtggctgaagtgttggaaaagc

SEQ ID NO: 4461 - DNA, 313 bp, Bos taurus
  Clone ID: 06-LIB34-023-Q1-E1-B5
tttgtggaagagtcaggcctcctcttgttcccacacgtgtacctccccttgttttgccctcttcactgaaaggagccaattggcctcttcactgctgctcatattcttgtgacatggcttactagaatcttccagaagaaaatgtaaatggcctacagtagcttatgtagaagattttttcttgaaactcagaaggaggcatatatttccagtaattttcttgtggctcctccagaagtaaaagaggagaagctggttaaataatttcattatggctcagatcccaatgggtttcaggtcctcctggacctgc

SEQ ID NO: 4462 - DNA, 224 bp, Bos taurus
  Clone ID: 06-LIB34-033-Q1-E1-B5
ctgttcatctgcagcgtgtgctagtcagtcaaccatactggtacagtcattagaccgcagctgccaacactggtccaaagactagccgtagagctggatcactgaccatctgagatatatcagaggcgttcacatcaaactggtcgcatcacagtcatgcatacggtctggaggatgtattctgcacattatgttgccctattcggctcaacatatgtacagag

SEQ ID NO: 4463 - DNA, 435 bp, Bos taurus
  Clone ID: 06-LIB34-035-Q1-E1-B5
caggtaatgtccttgcacagacacaccagacttacagatgagaataacaatccctgatttgagtaagccaatgcagactggtttctgttaaatgtaaccaaatgcagccctgataaacctgttcttttcctttacagacttgctctcccctagagacttcacctaccatccactctccttactcttccccctttcctttccatcatctcttaaacttctatactgtgctaagagataatctctaaccttaacggtcccactctagttcacacacagacatgagaacgaattacatctctgtaatgtgttgccagaggagatcagaaatcactgatgcacacagaggcattctcagggttgccgtattgatgtgtccaaaactgagttcatgactgcttcttactccaacacctcttctatttccattgtttcctt

SEQ ID NO: 4464 - DNA, 180 bp, Bos taurus
  Clone ID: 06-LIB34-036-Q1-E1-B9
acggacgcgtgggagctgcctgacaggcagctcgaccgttaccctgaccacctaattcaatatgttcatcagcatatgataatctctgagtataagtgcaggtaccttctggggcatctctattgatttgacttcctatgtctggttgcagtatgatatctaatataacattttagttga

SEQ ID NO: 4465 - DNA, 65 bp, Bos taurus
  Clone ID: 06-LIB34-042-Q1-E1-B5
acagagagacacacttacagggcgcaaggcacgtgaaagaagactgctgcctccagtcccaacac

SEQ ID NO: 4466 - DNA, 412 bp, Bos taurus
  Clone ID: 06-LIB34-042-Q1-E1-B9
cttctctggacccagaaacacacagaagtagaaacagtggaccttgtattgaagctaaaaaataagctgttacaggctgaccgagagcatttacctgtgaaacctgacactatggaaaagttacggacacacatagatgcaattatcttagcattgccagaggacctgcaaggcatattgctcaaaacaagcatgacatgatatttgccaagattttccagccaaaaggattgtacaccatgaagcatactgacatttcaaccagatgcacaagctgtctcggagtggaaaatagcggtgaaggctcgctacagggttgaaagactatactgtataaacagacatttttagtgcattatttttaaaaacagatatctgtggtggttccactttaatactgaaacaaccgaaa

SEQ ID NO: 4467 - DNA, 272 bp, Bos taurus
  Clone ID: 06-LIB34-044-Q1-E1-B5
agtggtctcgtccacacccactgcgcggccagcaaacttacaaagcccagctcacccatctccggggctcagacatcaagacgcattgccttgggtccacagctatcctgctgggtgcgcagatgggaggctgtaaatgtgctctgttagccttccccaaatgctgggggaaatcggtctaaggaatacatgttggggccagccccctgcctacattggaactggtcagtccctccgagagaaacatgacatgtttccgcgttcatagacct

SEQ ID NO: 4468 - DNA, 150 bp, Bos taurus
  Clone ID: 06-LIB34-044-Q1-E1-B9
atcaaagcagaatagacatgtatttttgttggctaaatgtatagtggatgaaaccattgcattcttgtacactgatttgaaatgctgtaaataggtcccgatttgtattgattctctttaaatataaaatgtaaaataaaatattccaat

SEQ ID NO: 4469 - DNA, 395 bp, Bos taurus
  Clone ID: 06-LIB34-046-Q1-E1-B9
aacttttactgcgccaacgctgtggcccgaggctccacgcacctctggcctgacccggcctgaagatgacattgctggcctctgtggtgtcctgctcccgtgtccggctcttcgcctgcttcctcaggctgggctctcagcaggccagccccctgcagctgcacacaggggccagcctcgcagccaagagctactatgaggtgctggtgctgggtgggggcagtggtgggatcagcatggccgcccgcatgaagaggaaagtaggcgcggagaacgtggccatcgttgagcccagcgagacacatttctaccagcccatctggaccctggtgggtgctggtgccaaaccattatcctcatctggccgtcgcacagcaaatgtgattccatctggt

SEQ ID NO: 4470 - DNA, 331 bp, Bos taurus
  Clone ID: 06-LIB34-047-Q1-E1-B5
aggcatcctgaggtacggtttcgtctaccatcattgcagagagaaatctgctggggggaacgaagaccgacacacctggacaattacagactgggatcaaagcacatactgacgcagattgatgtatcaccgctctgttaattacacatggggcacctgtcgattttcttctctaacactccgtacctttgtacgcacactgagcgacacctgcacgatataccacttaacagagtgacactctacatggacaacgagcacagtacaatggtcatcgtcactcgcgggaccgcgaatcatcatgtccgcgggtaattatgacctgcggtca

SEQ ID NO: 4471 - DNA, 327 bp, Bos taurus
  Clone ID: 06-LIB34-048-Q1-E1-B5
atccgaatgatctcaccgagtcctagcttaagttcgtaaaacttgactttgattcttgttttaaaattttttttcaaattgtctgatggctttacaggggctgaatataaaaagtattttacatgggatttattatagtcattagtaaataagtaatgtttttctctttaacattttaaagagttggctagagtttagtatgatgcaaataatacagtaaaataatgtgaaatatttaaaaacagattattcaaaagtaagggaagaacttgggggaaaaaatgagtaaaagctatacaagaaagtccaggcccacaatgtatttgc

SEQ ID NO: 4472 - DNA, 419 bp, Bos taurus
  unsure (398): Clone ID: 06-LIB34-049-Q1-E1-B9
agccgcctcgcgcagctccccaggcgtgcgcctagagttctgggagcctcctttgctgctgaaggagagacccctgccctctccggggcagcctccctgctccacgtgggcagggtgttctgtggcagcaggtatggcaggcgtggagcagcgcgagggcgccatccaggtgcagggccagagcctcttcttccgagaggctctccctggcggtgggcaggccgcccgcttctctgtgctgctgttgcatggcatacgcttctcctccgagacttggcagaacctgggcacgctgcacagactggcccaggctggctaccgggctgtggccattgacctgccaggtctggggcgctccaaggaagcaaaagcacctgcccctattggggagctggtcnccagcagcttcctggcagctg

SEQ ID NO: 4473 - DNA, 129 bp, Bos taurus
  Clone ID: 06-LIB34-056-Q1-E1-B5
tccggaagtctgggtcgacccaaacgtccgctctgactattcttatccaaccataatgagagtggtaccctttatctatcagttggtgcttgcgccggtatagtaggcacagcacttatccttcgaatt

SEQ ID NO: 4474 - DNA, 219 bp, Bos taurus
  Clone ID: 06-LIB34-057-Q1-E1-B5
ggacttctctgagtaggtggtggggaacctcagaggggctttaaggctggaggatggggacctgtgcaggagggctgcctgcagctgcagcttctctccagtctgatctgttgaggctctgattgataaatgcccctccagttaatgctcagcttaggcacattcattccttggagcagctgccttcctttgcccattacagacttccttctttatagc

SEQ ID NO: 4475 - DNA, 220 bp, Bos taurus
  Clone ID: 06-LIB34-058-Q1-E1-B5
aggatcttcacgaccgcctgtcccaaatgaacgggcggtgggaacgcgtgtgctccctgctggaggagtggcgggggcatctccaggatgcgctcatgcagtgccaggattttcatgaaatgagtcacggtttgctgcttatgctggagaacatcgacagaaggaaaaatgaaattgtccccattgattctaaccgtgatgcagaaatacttcaggacca

SEQ ID NO: 4476 - DNA, 190 bp, Bos taurus
  Clone ID: 06-LIB34-062-Q1-E1-B5
tgaggacttgtgggagtaatagaaacactttcaggaggttcacgaagttccttttctggctgcatgtctgtaaaaggccagtttttctttttttccttcaaccaaagcaacgtattgaatgaagacgcagagcagcgaatccagctgtcttctgctaagtcagatataaaaaagatttgcaaaaatgtac

SEQ ID NO: 4477 - DNA, 240 bp, Bos taurus
  unsure (228)...(229): unsure at all n locations; Clone ID: 06-LIB34-069-Q1-E1-B9
aaaaaaaacaataaagtcaatataaaagaatttagggaaacgagaatatcttatcaaaataaaatttacttaaactataagtatctggaatctgactggcttatcataatcactcaatcctaatataaaccatgagattaatttccagttaagccctactagtataaatatttattagtttttattgtaatttttcataaaatgacctttctgatttcactttattgnngcattcaaata

SEQ ID NO: 4478 - DNA, 238 bp, Bos taurus
  Clone ID: 06-LIB34-085-Q1-E1-B5
aggattcgcagggtcctgtggacttttttctgcctgaaagtctcaattaattgcacttttcccaggagccatttacgtgaacatcaatagacctaacatttgtataacacattgaaatttgtatagcactttagagttcttttgcgtgtattttgtcaatgaaccaagctgtgctcaatgacctgtttttttatgttgcctaataaatcatttgcatttctccaaatgaaaaagaaaa

SEQ ID NO: 4479 - DNA, 212 bp, Bos taurus
  Clone ID: 07-LIB34-001-Q1-E1-B11
ccacgcgtcagggaaagacaactgtttaataaaagatttacattccacattcgtaaagcatttttgttcagtattaacaaactcgacccaatcccccactacacccaatctcaacttgggggggcgaagacaaaagggcgcccccccaaaaggttccaacctaatttaccctcccatccaccttaatacccctccaaaagttccccaaaatt

SEQ ID NO: 4480 - DNA, 419 bp, Bos taurus
  Clone ID: 07-LIB34-004-Q1-E1-B3
ctcaaaacaccgaccaaacagagtaatgagcgtggagttgcttccacagctatgagttatgagataagctgctagaggcaagattttacaacacggcagaatatgttgtgaagatctatgtttgagtcaaagaacaggaactcaaacaggaaaatatatttccacggagctcagataacacacttatgtttgaaagacaacaagatatgttcaataacacatttattattttgttgagatgaacttaatttctctgattttcactgtgacagcatcgttttaatacaggaggtggagggggggctctttttagcatttgtagaatgttttaggaaaaaaagtatttgatataagaccaaatctcccttttgactctctcctcgtacctgaatttctgaatatttttatgataagaatac

SEQ ID NO: 4481 - DNA, 403 bp, Bos taurus
  Clone ID: 07-LIB34-005-Q1-E1-B3
gcccagcagccgcaaaaccccgtgtcatctctcctagtcctcctgcagccgccctagccgctgtccaacccttcccccggggtttgtgcagcggctcgcacaccccgcggcccgcgtacgcgctctgcacctgcctacccgaaaacatgttgcagaaacccgagagcggggctctccccatctctcaggcggagagggagatggatggcagccatgacggtgagacccaggctctgaccgcctcgcaggagatggccccgagccccctcctgcaggagaggcccgaggaggaccttggcgctgtaagggaggagggggctacagaaccctctctcaccccgaaaggcgcgagggctttggcagccaaaaccttggcccggcgtaaagcctgccgccgtctgga

SEQ ID NO: 4482 - DNA, 409 bp, Bos taurus
  Clone ID: 07-LIB34-007-Q1-E1-B3
atttggagccccctggggggccgtggcgggggtacatgacacctgtgcatagaagagggtgaggaacagctaccaggcgaggcggcatcacacagtcgtcccccaaagcaacacatttcctccaagcctgcctccagccccctgtttccctcccagtccatcagagatctgtacttatgttgaacttgaccctgttgctcagcttccaatctgccatcgtcgcccacccacccaagatcctggtccagacaccagctttaacctgggtctatgtcaggagtccccactgggccccagtagcatggacgtggtgcaccgtcgtgctaacacttaacccagttcgtgtcaaagccaaagttcaccgagcacttttcccctctttgcagtcctgttggtgggttggttggtg

SEQ ID NO: 4483 - DNA, 421 bp, Bos taurus
  Clone ID: 07-LIB34-008-Q1-E1-B3
ggcagaagaccgaccaggcacactacttatcgtgggattactgcgcacacctaagagttatgagatcagctgccacaggcaggattttacaccacgggagactatgtagtcaggatctaggtctgagtcagagaacacgaactcacacaggacagtagatttccacggcgctcacagaacacacgtatctttgagcgacagcaggatacgttcaataacacatttattaatttgctgagatgaacttaatttctctgattttcactgtgacagcatcgatttaatacaggaggtggacggggggctccttttagcatttgtagaaagtattaggacaacaagtatttgatatgagaccacatctcccttttgacactctccacgtacctgaaattctgaatatttttatgagaacaataca

SEQ ID NO: 4484 - DNA, 410 bp, Bos taurus
  Clone ID: 07-LIB34-010-Q1-E2-B11
gaactgggtgtgggagcagatgggttccccgcagggcctgggcgagctgcaggtggagcggtgagctgccggactcctgcctgccaacctccctgcccagccccagcaagactgcaccctcctaatgacaacgcactccactgttactcacaagaccaagggatggacacactgttcccaccctccccagatggctcctggctccctgagaggcagcagtgtggtacaggaaaaggccctacataagaaacctgggtccctggccctggggcaagtccctttccctctctgggcctcactctcccgcaggacggggagggagctagactcgggccagtgcccggactcctctcctggaatgcccaggccaaggggctcattcactcctagttgtgcatcaaatccacttg

SEQ ID NO: 4485 - DNA, 387 bp, Bos taurus
  unsure (379): Clone ID: 07-LIB34-013-Q1-E1-B3
aacagtctccagaagagaaactcacacccacaagcaaacagctcttagcagaagaaagtcttccaacaaccccattttatttcttactgggaaagcacaggaaggaacaacagaatgacaagttaaatgaagctttggagaatgagctggtacagctgcccttaacagaaaacatacctgcaattagtgagcttcttcgcactccagcccacgtcctgccatctgcttctttcctctgctccatgtttgtaaactcactcctgctgtctaaggagactaagagtgctgaagaacatcctgatgatgtcgatatggtggaagaaaaagaaagtgatgattcagatgaagaaaaatttcactgaaaagatccaggatacanataacaca

SEQ ID NO: 4486 - DNA, 419 bp, Bos taurus
  Clone ID: 07-LIB34-017-Q1-E1-B3
gtaatatccagggtgaagtaaattatcatgaagtccaggattcagataaaaatgtttattagttcattgcccagtctggctttcatgggagtttctatagatctacagataagtgcactattctgataataggtccatggcaaattgtgagaaaaagtatacattccaacaaatgttaactaattgtaaaatttctaatagaccagtagctcagtagtaggagagaaaaaaggtctttgatttttgctagcctatctgtatgtttattataatattactttgagtgattaggacactcaccatattgaagcataagggtcttgtttcctacagtgctttgagtaccagtgttttttcttccttcttggctttatcctaatcgtagccattaaagatgactccatgataagtctagaaat

SEQ ID NO: 4487 - DNA, 432 bp, Bos taurus
  Clone ID: 07-LIB34-020-Q1-E2-B3
gtccgatagaagccatgttgaagcaggcatcatgactttttttcttcttttttgagtcacttttctaattggagtaagtttttagaattacttcccagaaataaatatcgaaataatatgcaaactgaaatgtaaattgtagggcttagtctaaaagactgtacttgaagactaataagacctgtgccttctgtttgattagcccagttagcactgttgccagttgcctgtatcatgctcattattatatagattttccagaacttgcatttaagaaaaatatatctaatgtgtgatttttataaattgtaactcctacccccaccaaaaaaatgacactactatcgagccacttccttaaattaggactctgcagctttgatccaagacctaaaactcaagttgaagtcagaaaagttattaatttcttat

SEQ ID NO: 4488 - DNA, 395 bp, Bos taurus
  Clone ID: 07-LIB34-021-Q1-E1-B3
gccaggattaacacaccattgccttaaaccagcggggcccatacctggggtaagggtggccgagacctggacaagactgtttccacgggggtttggccaccagccagagggtgagaagcacccacaagaggaggctgtccctgaggcccagcataccagcccagggctctgcccattccgcagacagagctccttggagactagccccaggcaagcgttagaggcattcctgttgcagcagtcagtgctgagcctgaagctaaagaggccaggctaatgagggagaaagatgtcagcaacaccctagccttctggctcccccagggaaccaggaagctgctctctggtgctggagcaaaatctacacctggaacccctggcctcacccatgggaa

SEQ ID NO: 4489 - DNA, 242 bp, Bos taurus
  Clone ID: 07-LIB34-023-Q1-E1-B11
gacacaagatgatattttgtagctatgaagctcaagcttagagaagctaaggacttcgtgtacttattaagaagaagtactactgtttgtttcaaacctaccagtttataacacgagagttcttcctgtagcacttcatggtacttcctccactacatgccatagcagcctatctctctgcattttcaacatggataaatgacatacaggccaatccttacgtgccttcagcattttttgtc

SEQ ID NO: 4490 - DNA, 370 bp, Bos taurus
  Clone ID: 07-LIB34-023-Q1-E1-B3
taaaatgaatcgtctgagaacgcgaacggctgagctgatccgcacttgggaaaccgcacgaaccttctcctaggacttcgtcggccctacgtctgctcagcccagtggctccgcgcacctgccaccatggagctgcggcctcgtctcggggccacctgtttgctgggcttcagtttcctgctccttgtcacctcttctcatggacctaatgggcttggaaagggttttggagatcacattcattggaggacgctagaagatgggaagaaggaagcagctgccagtggattgcccctgatggtgattatccataagtcctggtgtggagcttgcaaagctttaaagcccaaatttgcagaatctacagaaa

SEQ ID NO: 4491 - DNA, 133 bp, Bos taurus
  Clone ID: 07-LIB34-025-Q1-E1-B3
ggagatctagccctgagatcaccgccagcccggtcggcgctgtgggcacacagggcgggcgggcacgccgtggtgtctaaactgctcaagggccttcctcacattcccgtccaaggggcccaagtcccgggcc

SEQ ID NO: 4492 - DNA, 410 bp, Bos taurus
  Clone ID: 07-LIB34-026-Q1-E1-B11
gaaattattcatgttgatacaattaactccatagaaattcagagatggaataatatttggttgccatatacatggactctatttttaactaaacagtaacatgattacacaaggggaaggaaatgtttacattgtaaaatcagtcagttacatctggaacttttcagactatgcatgaaataatttaggttttactatattatcagaacattctagccaaatcctacaattcatattcacttaagaaaatcagtagttaaaatgtgctgtttgtactgtagctatgttaatgcatatttcatttattgagaaagatatgtcaatataactttcaatttatgacaatttttacagtataattttgaattttattttaaacctaatgaaagaacacaggatacaaaatttgt

SEQ ID NO: 4493 - DNA, 399 bp, Bos taurus
  Clone ID: 07-LIB34-029-Q1-E1-B11
cagacgcgtgggtttccctgagtaagtagtgcatatcctatataaaactactaaatggcattggaaagtattcaatagattgaggggaaaaaaataaagttttactcaaatgttataaatcatatttaggattgacatccctttgaagaaaagcgaaatttgtgtttttttctatgtgatgaagacttatggtttttttaataagtggatgatacttaaaatagcataatgacaattctgtgtttgaatccatcttttgacaacagttaaaagatttttttactttttattgttgtcctcccttgtaattattaaagcattttgtgttgcagtaattccttttttatgtttaagggttttggtgaattaataatttaattgggttaaacaatacaaact

SEQ ID NO: 4494 - DNA, 407 bp, Bos taurus
  Clone ID: 07-LIB34-029-Q1-E1-B3
aaataaaataagaatcaatgtttagtagtaaccctggtactctctagacatcttgtcatgatctgctatgaaataaccttatcaggttattttcaaggtatgaaaaatcaaggccagttaagacaaaatgctgtgaatttcaaactctcagagagaagcaatttgggatacgtctttgggtattcaagatagtctcatgaaaaacctgaattctgtgatcttgagctaggttgccaaaggaagaaactagtgaacgggaaaaaaaaaagtaaaccttaaattctgtctttcttgagctctcggactgtgttaatattgataatcttgttgattttcatatctgtacccctgttcatttagaattttagtgcctgacttctttgttccttttggatgccaattgcttg

SEQ ID NO: 4495 - DNA, 415 bp, Bos taurus
  Clone ID: 07-LIB34-033-Q1-E1-B11
ctcacgggtcgacacaagcctccacagtgattcgtagcactcgctcaatccgtccaccccacggtcatcgcccacaaggccaccgtccacagacgccactgtccacataccggggaccgtcctgtggtcatgctccttctcccaggtcccatgccatcacccttgtcacctgtgagctcatttcactttgttgtttgttttaccagtttgttaagatacagctagacatgttagaacggaaaggattatagacgctgtgcactcatccataaagtttattactgttacggatcagttccatgaacgtaaatcacatttgctttgagacaaccacagacctccgtgtgctcactagtcaatggaacggattcctttgtcagtggctgtcgctggtaccctttcataatgtcagggt

SEQ ID NO: 4496 - DNA, 137 bp, Bos taurus
  Clone ID: 07-LIB34-039-Q1-E1-B11
ggtccacgcacgcgtccgcaaggaatgtgtttgctgccgtcccctgcccgtgctgggaccccaggctcacccttccacgcgaacgccccacgcacttgctaagcaacatggctttgatgataaatgatttttcttct

SEQ ID NO: 4497 - DNA, 219 bp, Bos taurus
  Clone ID: 07-LIB34-042-Q1-E1-B3
cgggtcggccacgcgtccgctgaaataaagtacatatgtaacaaacttttttgaaaactggcagtcacgagttaggaaacaccgtaactcacttgttttttttttgaccctgcagcttgtgggatcttaggtccccgatgagggatctaacccagggcccaggcagtgagagcaccaagtcctaatcactgggaccaccagggaattcccataactctc

SEQ ID NO: 4498 - DNA, 416 bp, Bos taurus
  unsure (300): Clone ID: 07-LIB34-048-Q1-E1-B3
ggccgcgcagcccaaaccccagcctgcagatgctgcaattacctcagagcctgaacgccacttcccacctgactgagtcaactgaagacaacaaaacatctccaccgccacacgcggtcacaaacagccaagctactaatcacagtctgggagctaccagcagagaggccggtctcctgccagggccagggagaagccagcagagccggtgagaagcccagccccgcggaagacaatgcagctctcatctaccacagctgcccgaactctagctctgtaagtgcagtttcctcctcctgnggtttttccactaccctattgagtaaccgggccgctcctgcccctctgggaaactcctatcgccaagcactcccaggtcttggctcccctggactggcctgcatgccctctcatca

SEQ ID NO: 4499 - DNA, 452 bp, Bos taurus
  Clone ID: 07-LIB34-050-Q1-E1-B3
tccacccacgcctccgaaacttttacagcaaaatgaagagctgtcattcaactgtttaatctaaatttgtgattacttaaggttttttttaagagaacatttttgtatatactaaaaggttaactagaatccaagtttcagtttcttaaacaaaaacaaacgtttcgtcactagataccttgtggactttattttgtaccttaacttattttactactgatatttgtcctgaaaagtcaatcatgacaacaagtacgtacaggattctttgttatgaatcacaaagttccttaccatgtaaactgtatcactgttctacagtaagctctcgtgttttatgacatgataaagcaaatgatcattttgatcacatttctatgctgtacaatgtctgattagcaatacagattaaattttacattgcactgttaactcaggaaatgattatttat

SEQ ID NO: 4500 - DNA, 244 bp, Bos taurus
  Clone ID: 07-LIB34-054-Q1-E1-B3
cgggccgcggtcttcaggaccttctccaaaccccgcccggcccacgcgaggcggcaagcagcggccaccaaaagaaaatgccaggcgtccagcgaggctcccccagcgaaacggaggagcaaagcctcttttctcccggccaagaaaactgccgctaaagaaactcgcaggaccctgaaggggaaggcacaaaggacattttctcccaagaagccctcagccggcgcgagggatggagaccagg

SEQ ID NO: 4501 - DNA, 172 bp, Bos taurus
  Clone ID: 07-LIB34-064-Q1-E1-B11
ggatgtgatcatcaacccttaaaatgtgttccaatcatagactggaaagcctgcgcctgccggaggcttcgctcccccagacccaacggctgtgtccttcatgggattccctcatgccaccggagccatgctccaggcctctcccatgatggcttgctcacctttatctact

SEQ ID NO: 4502 - DNA, 227 bp, Bos taurus
  Clone ID: 07-LIB34-068-Q1-E1-B11
cgggaattcccgggcctacgaagcgtcagggaaggtcaagacctcagagcctgcagactatgattactcaacagttggcttgcaggagattttaactgtgtatacttaatgttacaagttagagtccagcttaatgactgtttacacagcagagtccaggttggattgactgtaattcctgacagcacggctggctgtgttttgggtgttatctgtaagctcctgga

SEQ ID NO: 4503 - DNA, 57 bp, Bos taurus
  unsure (34)...(35): unsure at all n locations; Clone ID: 07-LIB34-068-Q1-E1-B3
ggtccacccaaagcgtccgacatccaactctcgnntggagggtttcaaagaaagcct

SEQ ID NO: 4504 - DNA, 326 bp, Bos taurus
  unsure (16),(20),(31)...(32),(38),(48),(54),(63),(66),(69)...(70),(77),(80)...(81),(87)...(88),(95),(102),(106),(108)...(109),(119),(125)...(126),(134)...(135),(140),(145)...(146),(155),(160),(162)...(163),(199)...(200),(226)...(227),(253),(261)...(262),(283),(285)...(286),(296)...(297): unsure at all n locations; Clone ID: 07-LIB34-070-Q1-E1-B3
ccggaaattcccgggntcgnacccacgacgnntccgcnttaacaatcntgcagntggttctgntgnaanntagcagntgnngcaaannatattantgtttantaanannaacgctcaantggtanntatggaanntcggntttannaatttctantgcgncnnaaatatgaaaagagtggtttttaaatccgatgggtnntcgaagatgaaagcctatttcaattnntgtgtcagcatgtctcaaagagtganccttaatnncaagttggtcccttactttgntnntaatttatcnntgtttgttcccctctccctcctgctcgcc

SEQ ID NO: 4505 - DNA, 229 bp, Bos taurus
  unsure (35),(46): unsure at all n locations; Clone ID: 07-LIB34-077-Q1-E1-B3
agtcgtattaacacctatttgtgcttctgagtgtntttgcatgtgnttagccacaggaataaaatagaaatgaagttgttgaatctggaaactggctgctcaaatgaaactcggatcagcctctagtcttcactgtcatctgaatgttcttaggaatctggaatttacctaatgaagatgtgtcattttttaatggaatttttcaggtatttctttctggacttttttt

SEQ ID NO: 4506 - DNA, 421 bp, Bos taurus
  Clone ID: 07-LIB34-086-Q1-E1-B11
ggccgacccacgcgtccacggacacgtggggccaactggttgcatagaagcagcaggattcagccagaaaagggcagaaacctcccttttctacaggaataaggatgtatgcaagacacagaaggttcaccatcacaaagctagcagtctacaaggagacagtaaaaggaataaaaatcaaacaacttcctatcttggaatccaaaccacaatggccgcccagtacctcagcgaacccaggaccagccacgggcttacaaacccaggagattcccagctgagacttgtcttagtgggtaagactggggcaggaaaaagtgcaacaggaaacagcatcctcagagaggaagtgtttctgtctagcttttcggctgtatccatcaccaagcactgttagaaaggaagcaacaccttgaagggg

SEQ ID NO: 4507 - DNA, 420 bp, Bos taurus
  unsure (7): Clone ID: 08-LIB34-002-Q1-E1-B7
aattcgncggccgacccacgcgtacagcggtgttcgtcccctgatcctcgcttttctctgaattcttgtgtcttatttctcattctctcgccgtattgcgctttcagaaaccctgcttgtcaagcgtgtctcgacaagtggtgccgaaatagggacccgaaagtaaatccagcctgagaagctagttcctagccgaggtgaacgtagggaaatctggccagctaggcggaagaggaaagtacttggctctggctcaattttttctgcgctgaggcataaggaacctgagctatttggaacccctggaaagccatctagtggtgtccaacctgataccatctgcctgggagcatacaaaccagtcaactttcagtttctttcaggccaagagcatcatgcacccttgggtagccatcctgg

SEQ ID NO: 4508 - DNA, 414 bp, Bos taurus
  Clone ID: 08-LIB34-004-Q1-E1-B7
ctctaatgatttgtgaataacgatacaaaggccataccgaccctacatttaacaaggtagttatgcaagtccaaattttgaaactatttaaactacttatattagaacttttgatatatactgaaatacaaattattgcttaactaatgtaattttccccacagacgaatatctggaaaagtaagaccaaaacatcatttgggatatatacattaatgaaaaactaatgttgtatctataaaaccttctgttgtcagccacacttgatagaaaatatgtttcagaattatctgtttcctttaaaagacaagaccctaatcttcttttaatttttctgaataaaggattttttaaactttaaaatttcaaataataaatttaaaatattttctaagtcctgagtatgttacagtc

SEQ ID NO: 4509 - DNA, 401 bp, Bos taurus
  Clone ID: 08-LIB34-007-Q1-E1-B11
agcggccgccctttttttttttttttttttttttttttctctctttattttttaatgagacaagatcccattagacctgtcatatagtaacgttgcctgtgggtgatttttccaaatttctgcttttttgattaatgaatccttcttaggtctacagtttgacaacaggttaatatctataacttccaatgtaattctcagattccagcaagcatttgtggggtgtgtctttggtatactcagggatattgtctcctatcatatggattggttttttgtgtctctttatcaagagttctatgtaaatttttaaaaataattttgtttatttatttttggttgtgctgggtctccatcgctgcataggcttttctctggctgtggagtgtgggggctgttct

SEQ ID NO: 4510 - DNA, 396 bp, Bos taurus
  Clone ID: 08-LIB34-010-Q1-E1-B11
ggactcgcgggccgacgcaagcctctagaatgagtcgtaggagcagatgggttccccgcagggcctgggcgagctgcaggtggagcggtgagctgccggactcctgcctgccaacctccctgcccagccccagcaagactgcaccctcctaatgacaacgcactccactgttactcacaagaccaagggatggacacactgttcccaccctccccagatggctcctggctccctgagaggcagcagtgtggtacatgaaaaggccctacataataaacctgggtccctggccctggggcaagtccctttccctctctgggcctcactctcccgcacgacggggagggagctagactcgggccagtgcccggactcctctcctggaatgcccacccc

SEQ ID NO: 4511 - DNA, 370 bp, Bos taurus
  Clone ID: 08-LIB34-012-Q1-E1-B7
gacacattgattactgtggggagtgagtttcagacatttaattgtatatcacaagttgtattctatattcccttgatcctatattcgatgtcactccgctacatcctgctcattgcctttgtacaatgggctacgttgagcacatctagcactttagggggatggtatacttcaaaatcatgcagatggattcacttcttccttctgtcaagctcatactctgtcgggtgggattggttaacttcagcgatgtgatacatcatcaacgttgcagggtctccatactggatttgcacactgcctctgaagtaggtacaggactcatcactccggatgttcaccagatattctctatcccactggattcata

SEQ ID NO: 4512 - DNA, 378 bp, Bos taurus
  Clone ID: 08-LIB34-020-Q1-E2-B7
aagcaatcagtcttatcagcagcgatcccatgccaaagaagtgtcacagagagttgggagatttaggccactacttattaatgaggacctccaggatgcactgtgtgtgacggacaagagtcttccagcttttatataacgcatgcgctcgctaggacacccaccagggtggctccattaggccaatttggagaatacatggcatgctcactatgctgggacagatggcgctgatggagacacagaatcaggtgaattacaaccttctatttgtgtcacttatgatctctcgtaaagtggtcaactatccaggtttcattatatctactctcagaggtcttccagatgaattgaagatatttgggtcaataccaatgc

SEQ ID NO: 4513 - DNA, 372 bp, Bos taurus
  Clone ID: 08-LIB34-022-Q1-E1-B7
ggtttttaatcgacataaagcccccgtgaggggcgaagcgtggagccgcgggcagcccgcctccgcgcagctgctcctttcagaggctgccttcctggccccgtcgtcaggctccgagtggcctgtcggaaggcaatccggcgcgctcctcccgtgggggtgagaaagcaatagtgtccacggaccgggggtgggggagtagcacgggcctgtggaagctgcgtgcagaatgggggtccaggcgccctcacgtggacggggcccgctctcgctcggggaacccagagcgggtgcggctgcctggccctgtcttccccagcccctcagctgctcgcctgaccctgtggatgacgcaagacgaacacgaggggg

SEQ ID NO: 4514 - DNA, 399 bp, Bos taurus
  Clone ID: 08-LIB34-032-Q1-E1-B11
ctgcgccggtcgtagcgtcctgctggccagttccgcgtcgccctgcgctgctgcagccgccgcggaactatggctgtgctcgtcgtgttcctgtccttcttggtggcggatgtctttgggaacgacttcagtatattaagatcaccagggtctgttgttttccggaatggaaattggcctattccaggagagcgaatcccacacgtggctgcattgtccatgggcttctctgtgaaagaggatctttcttggccgggccttgcagtatgtaacctattccaccgtcctcgggctactgttatggtgatggtgaaaggagtggacaagcttgctctacccccaggcactgtcatttcgtacgctttggagaatgcagttccgtttattcttgacagcgtg

SEQ ID NO: 4515 - DNA, 428 bp, Bos taurus
  Clone ID: 08-LIB34-033-Q1-E1-B7
gctaattgttttttaaagcaagtcaccttacggtggctttaattgtataagtcaagcacatgtaataaattcaaaacctgcagttaacaggatgttagacatcaatcctgataaccaaatattaaagattctctttaaaaaagactgaacatgtttacaggtttgaattaggctaaaaggtcttgcagtggcttttcatgccccttcaaattggaatggaactactgtactttgccatttttctataaatcagtatttttttttaattttgatataatacattgtgtgaaaaaagaaaatggctaataaactgtattaaatcttaaacaatgtataaagattgtacttagccagttcaaagtgtatatttattcataatgaattataacagttatatttttgtgttttcttgtaaatgtttccttttc

SEQ ID NO: 4516 - DNA, 123 bp, Bos taurus
  Clone ID: 08-LIB34-034-Q1-E1-B11
agactgagtcgtaatacatccagctgggctggggtctgtcactgatctctctgatggctcaggcaaggttcttctcaccacaagacatcactgtaggctcaaagaggctcattgcggaaactc

SEQ ID NO: 4517 - DNA, 239 bp, Bos taurus
  Clone ID: 08-LIB34-038-Q1-E1-B11
aaatgagatcaagcaacagtccttttgaaagtctttgaaaatgccaagtcagtgccaacacagtgcatttcagggaagtaatttttaataggacatcgacagtggagctttcggggttttcaggtttttaaactgctaataaatggagtctcattagactatatttcagtcagctgtcaaaacactattttattgatctacctgtgtactcctgacattgaccacattctgagacattg

SEQ ID NO: 4518 - DNA, 334 bp, Bos taurus
  Clone ID: 08-LIB34-044-Q1-E1-B7
aattcgccggccgacgcacgcgtccaggaggacgctgcgcacaacatgggcaatcacctgccgctccgtcccgcagaggaagaggaagaagatgaaattgaaatggaagttgaagaccaggataacagagaagccaagaaaccagacatcagaaattttgacacgactttgccgagatcacatagataccagggcgccgacatggaggacttccacgggacgactctgcaggacgacgacagctgcccggtgatccccgtgctgccacaggtggtgaggacgcggatgcccggggcagaccttagctcaccagctcctcagccctcaggaagtc

SEQ ID NO: 4519 - DNA, 190 bp, Bos taurus
  Clone ID: 08-LIB34-045-Q1-E1-B7
gtcaacccacgcgtccgcagacgcattcgcacggtagaccccctgcgatacctcaattccaactaactgaatctcctgtgccacccgtgcccaccatgcatctccactcaattctgtacaccggataattccaaccactgctccacatctggcatacaatcacaatcagcctcagcgtttcgatcattat

SEQ ID NO: 4520 - DNA, 409 bp, Bos taurus
  Clone ID: 08-LIB34-046-Q1-E1-B7
aggacgcgtgggcgctggcggcgcagaggagcggcggcatggcggcagctgccaaggagccgagttgggtggactgggacgaagaggaggaggaggaggaggaaacagagcagctggttatggtggaattatcaggaattcttgattcagacttgctctcaaaatgtgaaaataaatgcaagattttgggaattgatactgaaagacccattctgcaggtggacagctatgtctttgctggagagtatgaggacactgttgggacctgtgttatatttgaagaaaatgttgaatatgtggatgcagaatgcagtaataggactgtgctagaatataaatgccacacaatgaagaagctcaacatgacaaggactcttctgacagaggagaagaaggggaagaaaacata

SEQ ID NO: 4521 - DNA, 145 bp, Bos taurus
  Clone ID: 08-LIB34-047-Q1-E1-B7
tccgcgtccacccacgcgtcagatggatgctgtcgaagccacgcatggcggaacatgctgcactcaggttcagcatgtcagaagctatctggttcgcgctcagggtacaccatcagtggtccgtgcttcagagggggcacctcct

SEQ ID NO: 4522 - DNA, 449 bp, Bos taurus
  Clone ID: 08-LIB34-050-Q1-E1-B7
ccggggtcacccaagcgtccggcagcctcacccttcctcactccccattccgtccagtgagtttgagaatttatttggttggtgacattgggtgttttttttaatctttcgcataacctataatgaattttttttttaatgtaaaaagtacaactcacaacttgggcgttttgtgccttccagatgttacccaagcaccacctctctgaccatttctttaaaaagtacaagccacacacatgtaactttattgttttctgactgtgctggtgtttacattttttattagccgtctcattcaaagtggcacacattcctttaagagactgtccagttgcttttttcccatcagccctggtgggcgattttgtagaaccccgagggtttttccatcaagatacagcggcaatgcctgcatttccagcatgatcattagatgggcagttatg

SEQ ID NO: 4523 - DNA, 350 bp, Bos taurus
  Clone ID: 08-LIB34-055-Q1-E1-B7
atctgacatgaattgtattagaagaaaaactgctgtggatgggataacaatgtgttgagagaaacacatagtgttgtctcgccaaatattttgtacaatttttatcttgatactgtgaagaattgttttcagagttcagaaatcttatcttagcatatttaattattcattattgaagatatttcattatagtggcaggctgagtagtgaggtacgtggagagaagaaaataacatcaagaaagacatctgaagacacaatttggatcaacagatcatgggcacatttttaatctattaacatttaactgttttatttattttccccatatatttatattccatttatgt

SEQ ID NO: 4524 - DNA, 370 bp, Bos taurus
  Clone ID: 08-LIB34-056-Q1-E1-B7
ataaaatgtaacatctgcaccagtaaaaaaaggatgactgaaaaataccaaaaactgctaagaagcaacttatgtatcaactcaaaagtgtttaataaatgttaatgtgtgggggaaagcatgcagcaagctattgacagtaccagtttggagtgttattttctgcattaggtatgtctgttgtgattagactttctgaagtattatgtgcttatttttattacaaaaatgacttaataaatagagccctttatgtttagcagtaaaattaggatacaggccatcagaagtaaaaagaaatgtcctaaaatcttcctagagggaaaagacagatcacacagaaaagtaggaaccaatactgaggaagact

SEQ ID NO: 4525 - DNA, 223 bp, Bos taurus
  Clone ID: 08-LIB34-058-Q1-E1-B11
ggaagttacagaagctctggaaaaggtccacaaagtggaagacctccttccaattatgaagcagtttaatactaaaacaaaggatgggttcactgtgaacaccaaagttcccagcctcaaagaccaagggaaggaatatgatggcttcacgattacgattacgggagacaaggttggcaatatactattttctgtggaaactcaaaccacagaagagagaaca

SEQ ID NO: 4526 - DNA, 209 bp, Bos taurus
  Clone ID: 08-LIB34-059-Q1-E1-B11
gacctcatgaactgtaaagatttcaagtttactttcaagatgaatccaggtgatgtgattacctttgataactggcgcttacttcatggccgacgaagctatgaagccggaactgagataacccgccatctagaaggggcttatgctgactgggatgtggtcatgtcaaggctacgtatcttaaggcagagtctccagaatagaaactg

SEQ ID NO: 4527 - DNA, 148 bp, Bos taurus
  Clone ID: 08-LIB34-062-Q1-E1-B7
cgcaaccgattccggcgaaaccggcatgagccccggggagatctctcatttctttggatcaggcatggtgccctgggatggcttccccccatacaaaggggtccgatacatggaccatacgtcgacaattccgcgtaagcgatcacgt

SEQ ID NO: 4528 - DNA, 218 bp, Bos taurus
  Clone ID: 08-LIB34-065-Q1-E1-B7
gggaatcagcaggttctcactgaaaatatggagcaaagcatgaggaagaaagagatgtccagggcagagcctggactgttgaaggtataagttacaagcattcaaaataatgactgattcgattgacttttaaagtaaaggaaacatgagatcctcacaaggaatatgtaaacctaattatcaaaaggttatagcaatcaagattagcaaatgacagt

SEQ ID NO: 4529 - DNA, 209 bp, Bos taurus
  Clone ID: 08-LIB34-068-Q1-E1-B7
gtgatctgttggttggggttgtgatggaggtggagtgggatgcactgagagtgctgggagcggttacagccctgttcctgctgctgtgggcgacctgggctgtgggatccacagtctatatttacctgctgcctcaggcacgccggagcaaccactggctccgggcacacgggggccctgggcagtggtgacagggagccaccaagcgg

SEQ ID NO: 4530 - DNA, 78 bp, Bos taurus
  Clone ID: 08-LIB34-069-Q1-E1-B11
acttcatggaggtaatatcaaatggtctcctgctataatgtgagccctaggctttattttcttatttacaatatcgag

SEQ ID NO: 4531 - DNA, 257 bp, Bos taurus
  Clone ID: 08-LIB34-071-Q1-E1-B7
cactcctctaaggagcctctctctatttggatcaatagtttactcatcttctccgtgtttttgtttgtaaaggacctctcatatctttctctctctcacctcatacaccttcatccagggggtcagtgtcatctttgaggctttttatcggggggtttctctgtgctgacagcacactacttttacttggtaagataaattcccatgtcgaacatgtgttgttgcacgtgatcatagcactcacttttgatatttct

SEQ ID NO: 4532 - DNA, 303 bp, Bos taurus
  Clone ID: 08-LIB34-074-Q1-E1-B7
agagcaaagtgaaatactcaagactctctagtacggatgatggctacattgaccttcagtttaagaaaagccctcctaagatcccatataaggccattgcgcttgctacagtgctgtttttgattggcgcctttctcattatcataggctccctcctgctggcaggctatatcagcaaagggggggcagaccgggccgttcctgtcctgatcattggcatcctagtgtccctgccaggatttaacaacctgcgcatcgcctactatgcatccaaaggctaccggggatacccctatgatgaca

SEQ ID NO: 4533 - DNA, 182 bp, Bos taurus
  Clone ID: 08-LIB34-075-Q1-E1-B7
aaacgtccaaccctttgcggtgcaaacaggcatttgtatatttcaaaagaagaatgtgaatatagtgttcagaatttcgtcaacttatatgaccattaacgttcgcatctctccttcgcctttatgagcatttcatgaggttcatattgcaaaggacacaccttgaaaaacatcttgtctgg

SEQ ID NO: 4534 - DNA, 412 bp, Bos taurus
  Clone ID: 08-LIB34-076-Q1-E1-B11
ctcgacacaaacctcagggatgtctcttatgagtggtcatgaacgtgatcttcaggatatgagatacatggtttacataacctttgttctcctgatgtgaagtttgtattcattttcctacaactcagcacttttgttgtccattactgtttactatttacaacgattaatgttttatttgctttatttgtgcttttcagagagttgtcataatcatggcacttatgtttgtggcactatcagtgccagaattcatgggaaatttatcaaatgattgcaagttattcggcatcctaaaggaaaccgagggtttttttgaaagtcatgtatgttttatgattagctttgtgatcagagagaacagagcattctgtatcgtcttgccttatgtgactattgatccatgtgactg

SEQ ID NO: 4535 - DNA, 369 bp, Bos taurus
  Clone ID: 08-LIB34-079-Q1-E1-B7
agggatttactaagactgaaaagttagtacaaaagctaagacaaaagtctagtttaacaggctactcattcagtgctttccccacttcagcacaaggagttttgaaagttttaatacatggcttttgttattcctaaaagtcagctcttgggagaagcattaacaagttggaaatatatactcgcaacgtgagagctctatctgtattatgtggcaaactagctgtatttgggtctaataagatcaagaaatgatacaaggaattttcttttccccttcccaaacttttgagtcagcctagtacgtcagagtattaacatgtgccagatcattaagactccttcactcttcctgactgaaagatttttc

SEQ ID NO: 4536 - DNA, 392 bp, Bos taurus
  Clone ID: 08-LIB34-082-Q1-E1-B7
attgcactgaacggattaccactaagacaaatgctttaaagacccatgggatgaattggatcaccggcgagggtgattaaccctaactgcgctaaacagttaaacgtatcatttaccatgatgagattgactgccagcagcctgtgtaccttgagacttcgtagcaccacagactaccatcatttggaataatgtagactttggtgaccaatgcaatttttcagaagtcaaagtaactggcactgctttaaacggacgttttacagcggcatgtcaccggaatccatatgtcttccaattaactggcacatgtacattacacaatacatagacatggaaggtccgagaaactcgagagctcaaaacggacacaaccgtcctctgtatctgtc

SEQ ID NO: 4537 - DNA, 411 bp, Bos taurus
  Clone ID: 08-LIB34-085-Q1-E1-B11
ccgggccgacccaagcgtcagggaagcctgtgataaagccttcagttcagagtctcagaggtagagcggagatggttggcagggtagggtccgcagtaggggtctctatgcgtgagcttggaaagctgcccagggggaggccaggggcaaagtttcaatggcagaagggtgttgaaattcaggcaaaacacagttgggagttagtgaggaaaccacatacttcagaccagaatggggagtgaaaggagcttagaaagtgacactcaatattagcatttctgtccaaggcccatatgtacagttgtccttgctgcttgcaagaggctcagtaatgtctgatgatgatttcctcaagaccactagatgtctttatttactcttctattcaagcagcagtaatggaaagtaaag

SEQ ID NO: 4538 - DNA, 391 bp, Bos taurus
  Clone ID: 09-LIB34-001-Q1-E1-C1
ggacttgtagtttattacaattctccactctgtgtttgtgatgtttataccaggatcttttatttgaacctaaatttactgattgatgttcttcactcctttcccaaaggggaaaactaagacttctccttcaggataacagatacttatttaaaattcacagctctaatcactactgaaaacataattttggtgatgaacataatttgagaaactttatttctgaatgtttttatagaaaattacagagggcctattactgatgaagacatttaaagaataccttttcttttttcctgttttataaactcccattgctacttggtactatttaacctatatgctattttagcttttagctaaataattttactttttcattttgaatccc

SEQ ID NO: 4539 - DNA, 379 bp, Bos taurus
  Clone ID: 09-LIB34-007-Q1-E1-C1
gttttgagcttaaaacagactattctagacaaagaagaaaagcaaagaagaaattattgaaaattttaactcatgatcctaatggctggcatctccttgtctctaattgaaagctgatgttaaactgttttgatttatatttaagataaagagattcatgcatcagcactgaaagttaaatgctatacttgaggtaattgactttaggttgagtaactatgttgagtaggtatgctttttataaagtgtaaataattaataataatgtataattgtatcttattacagtacaatgtttaaagaaatgtgtagtattttcttcaggaaaactgttttgctgttttttattcccaactttttatttaaaaattttacctca

SEQ ID NO: 4540 - DNA, 118 bp, Bos taurus
  Clone ID: 09-LIB34-009-Q1-E1-C9
acgcgtccgataaaaatgtgcctttcttgtagctccgttgcacagagtccataacgacatgtacacagcagtttgaccattgtctatgtcgtagataggatgtgacgttgctatgatg

SEQ ID NO: 4541 - DNA, 410 bp, Bos taurus
  Clone ID: 09-LIB34-011-Q1-E1-C9
gggtcttttttttttttttatttttttttttacagcagacggtgacactttattcatttaaaaacatgcccttccccaaagggcatgaggcatgtgtgtatgtttctataaagatatggatgaactatgctgaggttcagtggagccaagcacatacaatatcattcaaccaggatgagagcagagactcccaatgaccagtattttatcagcagtagcatcactggtcagtacccaggacaacacttggccttttcttaggttggcatcactgattccaaactcagatggatctgtccactaggggtttggactctgtttctcccttcctctctatggccataagggagccccaactctcatgaccctcagatgccaccaaaaaaaaaaaaaaaaagggcggccgctct

SEQ ID NO: 4542 - DNA, 204 bp, Bos taurus
  Clone ID: 09-LIB34-012-Q1-E1-C1
aggaaacgtgggctagttctagatagcgagcggccgccctttttttacttgtgattccatgagacatccgattctctctttcactattgtttttatttaaacctcatgggttcgtcacttttactcaggccacgtaattcaatggacaaattaaatcgtgaacacaatcattaagtggcagctccacctcgaaaatccgcatgc

SEQ ID NO: 4543 - DNA, 432 bp, Bos taurus
  Clone ID: 09-LIB34-019-Q1-E1-C1
cagggatgaaggagaaatcatctattcagccactttctcccagtttagatactcatgtatgacaggtctgactttccaggctgaatataactagctacataggtcattttaggcatcaaatgaaaggaccatctaaccattatcttgacattttaagatggtacttaacctctaaatgagtacaattttaataaattatcgatttgtaatgtatgacaataatcttaatttcaagtgtaacaaattgatcttttaaaagttatacaagttttccatctccttgcaatctcctcctcctccccaccaggtgctcatccatcaagacacaactttcactttatgtcttaacccttttcttcagagtgtgaagtcagaacttcctttctcagcaaagataaatgccagaaacttagcaaactgattaagaaaagg

SEQ ID NO: 4544 - DNA, 191 bp, Bos taurus
  Clone ID: 09-LIB34-021-Q1-E1-C9
cagacgcgtgggtggacatagggggctgtctccagacagctccaccaggaaccaagcaaaggccaaatagtctggcaggcaggctagtggtgttgtgtatatgggtgggacgtgcgtgtcattgttatttgaattgtgctgttgtttagggaaaataacagtaaacaataataaaaggaactgatgttatt

SEQ ID NO: 4545 - DNA, 301 bp, Bos taurus
  Clone ID: 09-LIB34-026-Q1-E1-C1
aatttgatgtaccactagactacagacgcactacaaggcctcctcattgaattcttcaaagaccgcacgtatcagatagcggcctgactggtttataatatgttctacagttcagtgcactgactggcaacacttacattcgaggctctctgttgctgttaatgaaatctggctgtacaccaacactgtttgaattggcagagatgggaccctcgatgggcttgggtcagaggcgggcacacctgtcatcagatgaacgttatgcattcactaggaagatgcccaaagccctgaccccatt

SEQ ID NO: 4546 - DNA, 229 bp, Bos taurus
  Clone ID: 09-LIB34-027-Q1-E1-C9
attcaagatcgcgagcggccgcccttttttttttttttttttttttttttttttttttttttttttgacactatcatttttgatcaattagaggccgattttacatgagggtgcgtaagcagaattggtttagtctacaattttctcattcttggattcaaattaaacatttttgggaacgtgttcgtcacatcaccgtacatcaagagacatatgtcaatttgtccca

SEQ ID NO: 4547 - DNA, 236 bp, Bos taurus
  Clone ID: 09-LIB34-032-Q1-E1-C1
cggtcaactccgccagggatggacttcgattcaacctggagatcattgctgagtcgcgatggaccaacgagacctccaggcatctatttcgacgccaggggatagtccagctgcatgagatgctcgtgcataggcttgctaaccgcaggacacagggtcacagtcgcatggttagggaccatgcagatgttactgcccagcacagtcaggtctagaatgccaacatctaggtcaga

SEQ ID NO: 4548 - DNA, 280 bp, Bos taurus
  Clone ID: 09-LIB34-037-Q1-E1-C1
cgttgttatatgtcacaagtttggtcactcgagagagttcttacatttttaagaaccatgccctaaatttgtaaaaacttaatttaactgttaagtgtgaatatggataaatattcatttagagtaatatttggaccaacacatttcagtatagaaccaaatttttgcaacacttagtatacttttaaaaatcctaacccgtttacaaaccctaatttatttgtaaaataatttaacctaaattaggcaaatcctaaaaagagaatccttaaaacaacca

SEQ ID NO: 4549 - DNA, 197 bp, Bos taurus
  Clone ID: 09-LIB34-039-Q1-E1-C9
gtccgaaatttcaagatcgcgagcggccgccctttttgttttttttttgaaataaccaattctagccacctgactctgggggatcctgattggcgggcgctgcaccaaggtctactgcctcccagagaatgttgaacattaagatcaataggaatggcattcgtgtgaggttaatcattatgctccaacaacattga

SEQ ID NO: 4550 - DNA, 413 bp, Bos taurus
  Clone ID: 09-LIB34-041-Q1-E1-C1
cgaacgcgtgggcagacttcactcttcccagatctttctgcttgagtcaaacttgctgatgtttcaccaaaacattcctgagctgcctgactcttagtcacttatctccagacgctgatgctcaatagataggattctcatgagtgacacctcatctgaggcttcctccatagtagaagcgcagggaaagtaaactctaattacattacacttgctgtactttaaggacattggaagcaagctaatcctgaagactgctgctctacccaggatagaggggaagaatctccctgccctccccttccctcatggagagggcttttctctactggttcaatagacagatatgccgtattctacaataatcactttgaagcatacgattgcccaggtcttgcctctgattccatgag

SEQ ID NO: 4551 - DNA, 150 bp, Bos taurus
  Clone ID: 09-LIB34-044-Q1-E1-C1
aataaactttattgatgcaaccgagggaactgagttacaaacagtgaccagggggctgcgggtgggccctcggagcccccaggatcctggtcaagtactaggaagcttcggtcaccttcttcctttcgtcctcatgctgcgtctccaccg

SEQ ID NO: 4552 - DNA, 410 bp, Bos taurus
  Clone ID: 09-LIB34-049-Q1-E1-C1
cagcaatggaggagaaaattctgcaaactggctgattactcatgaagataagattttatttttgtggcaggcatctgtggggtctgtaatagaaatgatggctggctgtggagaaattgatcactctataaacatgcttcctacaaacaggaaagcaaatgagtcctgttctaatactgcaccttctctaactgtccctgaatgtgccatttgtctgcagacatgtgttcacccagtcagtctgccttgtaagcatgttttctgctatctgtgtgtgaagggagcttcatggcttggaaagcgatgtgccctctgtcgacaagaaattcccgaagatttccttgataagccaaccttgttgttcacagaagaactcaaggcagcaagtagaggaaacggtgaatatgcct

SEQ ID NO: 4553 - DNA, 242 bp, Bos taurus
  Clone ID: 09-LIB34-052-Q1-E1-F8
cattctgttctccaaggtcataacttccttggagaacttcctgacaagcaaaactcaaaatcctccaagactatcttccattctgcctaggtttcccattggaggctcctgctcttattgcccaaccttagagatacttggttctctggtgctgccgaaggtgcttccaggatccctgctcagcgctggggttcacagcaagaccaccagtgctcaggcaggccaaggggcacacagaataa

SEQ ID NO: 4554 - DNA, 348 bp, Bos taurus
  Clone ID: 09-LIB34-055-Q1-E1-C1
agaggcagtcgccaccagggacgagcttcagagaaaaggaacgcggagtccacgtcccgagtgcctcagtccggttcgccgctgcccagaacctcctctgggagcccccacccggggagcccccaaccgcccccgcctctgggatccctctgggatcgcccagggtcctccagcgcggctgttgcctcgggcgcgtgcacttgggcgccgcggccttccggggagcgcgggagccgggcggccacctgtacgcagtgccccgggaggaccgccgcccgcccgtgtcccccgccgcggccgtcgctctggaggccgaaccgtcccgcgccgcccagcgtccccgccatg

SEQ ID NO: 4555 - DNA, 351 bp, Bos taurus
  Clone ID: 09-LIB34-063-Q1-E1-C1
aaattactcaaaagttaaagtagagtaagagcaagtatgtatttaataattatattcttagacaccctaatacttaattccattagcaaatgattattgaacaaataacctctaccaagtagtcccccaaaaatgttaaatggacaattttattgaaataaattaaattacgtttatctgaaaaaatacgcagcattattcaggaaacgggacattgcataggaagagaaaccaaactcagtgtggcaagaataaaactagaatgagagcactatacgcactcaaggccaagcaccattttgatgaaattaatgatcatgcatgtgtccttgttctgctcatttcatccac

SEQ ID NO: 4556 - DNA, 109 bp, Bos taurus
  Clone ID: 09-LIB34-065-Q1-E1-C1
atccgctgacagtttcccaaagattcagagtaactgatttatgcatctctttcgtcagagcttcttttgtggtagagaagctcagagtaaggagatgcatggggggagt

SEQ ID NO: 4557 - DNA, 247 bp, Bos taurus
  Clone ID: 09-LIB34-067-Q1-E1-C1
gacccacgcgtccaattctagatcgcgagcggccgcccttttttttttttttttcttttataaaaaatttatttccgttaatacaaattccaacatcaacaaacaatagtccagtggaaaaatactaagcatgaaaaagaagcatcataaatgaaagatttggaagaataatgcacaactacctgtggaaaatggggggttccccaaaaagttccaagccagtgtaggcgagcaatcgaccgaactt

SEQ ID NO: 4558 - DNA, 162 bp, Bos taurus
  Clone ID: 09-LIB34-068-Q1-E1-C1
ccggggccaaccaaacgtccaggcctgcaagaaagtggagggaaaaaggagctccaaggaaggagaacaaggggaaacgtaactggccaacccggccggaaaagcgccaaataacccttggtccaacaagataacgccggcgttttggcccattacaaccag

SEQ ID NO: 4559 - DNA, 392 bp, Bos taurus
  Clone ID: 09-LIB34-080-Q1-E1-C9
acggacgcatgggcagctactgaagccgacacacagcatctactgagcccacacacggtatccactgaacccacacactgcagctactgaagccgacatacggcatgccactgagcccacacacggcagctatgagagcccattcaccctagaacccaggctctgtcccaggaactcactgcaatgaagagcccacatgccacaactatggaaagaccacgagcagcagtggagacccggtgtaaccagatacataactactcatagtcaatctatatatacaattgtaagacgaatccattgatcatgaattccctggtggtccaatggttatgacattgcacctttactgccatacgcctgagttcaatccctgaccccataatacatgc

SEQ ID NO: 4560 - DNA, 427 bp, Bos taurus
  Clone ID: 09-LIB34-086-Q1-E1-C1
ccgggtagaccacgcgtccccggaagcgtggggtaactttcctgttacttgcttgcagcatcttcaagatcccggttttgtctcccgctgcatttgcccaggagtgtccctaatattttgattcctgccttgaaaacaggcaccgcaggtcctcccccaccccccccggtcccccaacaggggaccttacgatgcatcccactgcagcatggctctgatggacgtgtgtccaggttggggaaaacacacttggtatatgtttttatctgcacaaatgaaatcctgtctgagccaaaaatttcacttctgacttaacggtggtttgcgtaagaaataagccagctggcatagagagggtacccacacactcgagcagtttatattttgttagaacactttacggttccggattcagaatttaacatcc

SEQ ID NO: 4561 - DNA, 197 bp, Bos taurus
  Clone ID: 10-LIB34-001-Q1-E1-C5
tccggctcgaccacgcgtccggtgaggggggatacatacacacactgtacatgtacacttccagaatatacacagaatttctaaacttcagtttttccacagtcggtctagtacgttgcatttccatcagctatgcggtggcctttaggtgactccctagcatcaccaccattggtcagcttcgatcctacccatct

SEQ ID NO: 4562 - DNA, 415 bp, Bos taurus
  Clone ID: 10-LIB34-004-Q1-E1-C9
gtcatggactacactgacataatccagatctccttgtctttaccccaggccgttcccttctgggctagtctcgggaacaatcagcaagtgcacaggcagcgttcatgtctgacgccaacctggtgttccaaggtccatgctttcatgatcccagtcatactcccttctgggtcgggccttggggtttgtaacaaggtgattatttttaagaaaaacacgcagtataatcattaacacagtttcttaatatatgctgtttttccaggtgttatttctgtggaatttcgcaaggttgtgaaagtacagtattagaaattcccactacacacatcagctttagatctttgtattagaccactggttagttctaaccttagatctaaatactacacaagtgttgcctccacaaaacttg

SEQ ID NO: 4563 - DNA, 363 bp, Bos taurus
  Clone ID: 10-LIB34-005-Q1-E1-C9
ccgcaggcttccacagctgacactacatggaagctgacaccagtcacttcccatgggatgggctgctggggtgagaggttggccaaagcacccagagcccaccaggtccagtcagcagggaggtgggcttgtccctggggctggtgtgggaggagggggctggccgagggcccttccagctggcacatgggctctcccaaagcttcagcaaaatcacccaaacattcgggcagctttggaagttccaagcagtccacctcccatcgactgccttagcgtctcgggcagccagccctgatggcatagctgagatggtgtgcgttttattcatccgtcccatagcacccgtgctgcccctgcccc

SEQ ID NO: 4564 - DNA, 72 bp, Bos taurus
  Clone ID: 10-LIB34-010-Q1-E2-C5
cacgcgctccactaaagtgctgtgcgtgaccgtcgacggggccgacgcgtttacggcagcgtgccgcactgc

SEQ ID NO: 4565 - DNA, 416 bp, Bos taurus
  unsure (402): Clone ID: 10-LIB34-012-Q1-E1-C9
atccgatctctgccgggacggccgggggagagggccctcctcaaggccaaggctctttgcggaggagggagcactggacgcctggtcaagcctggtgagctccataccacactgtcctctgcagctcagagaggagcagtgcccagcggaggcccctgtctaccctgccccacttccatctggggggcaaaaccgggaaacctcatcgacgaagctcctccagccatggactcggcagccagggacaaaacgcaacccgcactccccactgggctggagtggccggagcaggaaagggcggagcagctggcccggggtgcagcactcaagtgggcctcgggcatcttctaccggccagagcagctggccaggctgggtcagtaccggaaccgtgaggtgcancggacctgttctct

SEQ ID NO: 4566 - DNA, 388 bp, Bos taurus
  unsure (302): Clone ID: 10-LIB34-014-Q1-E1-C9
aggggagggaggagacgaaggacttggggcgcgcagaatggaaacagactgtaatcccatggaactgagcggcgtgtcaggatttgaagaagaagctgagcttaatggctttgaaggaactgatatgaaagacatgaggctggaagccgaagcagttgtaaatgatgttctctttgctgttaacaccatgtttgtctcaaaaaccctgcgctgtgcagacgatgtggcctatatcaatgtggaaacaagagaaaggaacagatactgcctggagctcactgaagcagggctcaaggtggtanggtatgctttcgaccaggtggacgatcatttacagactccctaccacgaaacagtctactccctgttggatacgctcagccctgcg

SEQ ID NO: 4567 - DNA, 399 bp, Bos taurus
  unsure (375): Clone ID: 10-LIB34-017-Q1-E1-C9
ggaagagttctaccaggtctttggcatgaccatctccgagtttgaccggctggccctctggaagaggaatgaactcaagaagcaagcccggctgttctaggcagaggctctataaatatatatgcatttatataaagatatatgtaaaatctctatactgaagctcggtataatcctcttgtgtaatgggacacactgcctgccatgagacttgcttttctgtatcgtcaggcaagcccacatcatcaagatatttttatgctccttactttctcttttttaagtgcaatggggtttgggaaggaatttgtggggactcccatccttttactggggagcctttttatactgaaacatctgtcctgacttgagtcncccagggtccaactctctttcctg

SEQ ID NO: 4568 - DNA, 95 bp, Bos taurus
  Clone ID: 10-LIB34-025-Q1-E1-C5
cagacgcgtgggtgtgcagcaggtactctttgtatttttaacattcactttgggtaaatgctttttcactgttaataaatgtgtatcctgcatac

SEQ ID NO: 4569 - DNA, 398 bp, Bos taurus
  Clone ID: 10-LIB34-030-Q1-E1-C9
ctagttctagatcgcgagcggccgccctttttttttttttttggagaataagattccgtttttgtccgttttgttttgcggctgggggtatagcaggagagggtgcggggccaaaacgagctggataagcgctttggaatccgcataggcaggtggtgtcaacgggccgcaacgggagtgaagaattggagcagtgagctggatacatcggtggcaaagcccgaaactatcaacagatattttggcaaagggtgcgcgtgtggggagggggacagaagggctcgttattcgtgcgactgtctcgattcgccccggcctccgtgcgcgggggtggacttcgttccaagcgcatcgcgcgcgcccgcggccctggtgcgtcccgacgtgcgtcctggggt

SEQ ID NO: 4570 - DNA, 241 bp, Bos taurus
  Clone ID: 10-LIB34-032-Q1-E1-C5
ggcacaggtcctagactcgcgggtcgacgcaagcgtctaatcagagtcagcctaaaagctgcattattttcatcctaactcaggatgtagtttagtgaccagaattgagaagaatgtgccaaatgagcatcagtcaggtggatttttggctatcgtttcaaaagtggaatacatttataaatttaaaagaaaaaaagaaaaaacaaagaaaaaatcaccataaaacaatatgcaagaatag

SEQ ID NO: 4571 - DNA, 345 bp, Bos taurus
  Clone ID: 10-LIB34-032-Q1-E1-C9
gtccaggggaggttactagctttggagagcctctcagtccaggtgaaataaggtttatagaaaatcaggaaaaatatggtgaagcttccagagtaaagcctgaacccagtccgttaaaagaaaatgctctgaaatcttgccagatacatgtaaatggaagccacagtgatcatccagacattaactgccacaaagttgtaagggatattctattagaacagtcactgcagagccacaagaaactcaaactaactaaaatgagggcaaaaaagaagaaaaagaaagaaaagaaattgacagataatttgaatgaaaacttacagaaaaagcgtgaaagtcctcaat

SEQ ID NO: 4572 - DNA, 407 bp, Bos taurus
  Clone ID: 10-LIB34-033-Q1-E1-C5
ctagttctagatcgcgagcggccgcccaatttttttttttcacattctaaaaatgtgtttagataagaaggaaaataggcaagcttactctactcttgttaccatgacttaatccacctcttctgttccttgtaaatccatctatgaataaaaactgtgcctgaaaagatacttaacagcctcactgtaccagttgcctgacctagaaatactgtgtccctctttgctaatagagtttagtgttttataacttccttaaacagctaaaaagtggttaaaaggactgtaaagtgacagcataccttgcaaagtgaacagtagttaagatgtaagttgattccatgtaagtacatactttaaagctttattagctttattctctttataatgtttcaacaaaagtgaaa

SEQ ID NO: 4573 - DNA, 402 bp, Bos taurus
  Clone ID: 10-LIB34-037-Q1-E1-C9
gaacagaaacctcacagtcttacatagcaatcgaccccagcttctctgtctcctgcttccaaaaaatgtttaagtgatttagaggtttctaaatactgtgaattttgtccagaatgtgggaaataagtagaaaatcagactacacgccagcgttgtggtatacctttttctaacgatttgcatcgacattgcagacaagctataactttgaatgaatctgctggactatcattaagaacatcaattcatcagaattctggaggacagcagtcacaactcacactattacgagccatgacattatatggcaacagtgtgggaaagattccaactgatagtaatgtgagttgtgatgatagtggacagaattaattacatactaatgcgaatgtcaatttgtct

SEQ ID NO: 4574 - DNA, 420 bp, Bos taurus
  Clone ID: 10-LIB34-043-Q1-E1-C5
agtcccccgaaacagtgattgttttctagaaacttcttaaaagtgccacatgtggcagtacaaatgagtctgagtgtaatagcccagagatttctatatagttgaatgtctaaaatggtaaaatgtgccactgtggcagttacagtggcttatgtttttcatagtatctcaaatgaactcctatttttgatagtaaatgtcatttaatagtgtacttgccatttgagcctcactgtaaaatgagtgcagaggagaaacaatttttaatgtaatcttgattttacctcatatactgtacattccaaaaactctaaactttttaaagattatagatacactaccaaacatatcaccttaaaattgtgtaaggatgaacttcatacagatgaaaaaatataatctcataaaaatacattaact

SEQ ID NO: 4575 - DNA, 346 bp, Bos taurus
  Clone ID: 10-LIB34-044-Q1-E1-C9
aggttggcgttgtcatcgccgtatcatcgcatttctcgaaactcctgggaccggtttcacactcgctcccgctgctgtgcgttaactgagctgtcgtctccacagtctctctatacctgctgcctcaagcacgccgcaacaatcactggatcctgacaaactaggtctgagcagaggtgaaaggagccaccactggcaatcgaaacgcttaagcaaattagctcgctcggacacgtctgaacctcatcctcatgcagtcggcacctgagcaagtttaaaccccatgcaaagcgatatagaggggcttcaacgtaataacatcactagtgatacaagtgaatttcat

SEQ ID NO: 4576 - DNA, 230 bp, Bos taurus
  Clone ID: 10-LIB34-051-Q1-E1-C5
caataaatcacctttacttttgaaatgttagccttttcaggttaggatccctttctagctttctcaatgaataaaagaatgttgaatctctgtgaaatggaattcatctgagcctcttgtggtatatttggataagttacattttcttagtgatagaggagtatggttttagtttttgaagtacccaaaattttagagattttgttttgttttaggttagcgtcttctct

SEQ ID NO: 4577 - DNA, 349 bp, Bos taurus
  Clone ID: 10-LIB34-055-Q1-E1-C5
gagcaaatgaggtagagaaatagaaatggtttgtgccatggcatttctgtattataagcttttcttatatgtagcatttctccaaagttggccctattaatgaccttgggaagtaatagttaatattttgagttcaaaaagaaaactacaaacattgttttccttgttctaaagatgtcattttctcatttcaggcaaaaaccattttaaaatgaatgttcaaacaaagttgaagtaaccagctgtttttattgctctaaatgttccccatgcctgggcacatggacacagctgggaatgcactttgataagggactgtctggtttcaccaggcatgaaatgagtctta

SEQ ID NO: 4578 - DNA, 200 bp, Bos taurus
  Clone ID: 10-LIB34-058-Q1-E1-C5
cagagagtcattatattaatataagagtgcgactgcatgctcaaagttatcagggagcaactctctctcatggtctagatgtcttatatagcagacgtgtaaggaaagagatgactacaggtgcctatgaatatatgttccatgtggggcttttggtttgattctttgtcatatcgatttggcgggtcaggttatattta

SEQ ID NO: 4579 - DNA, 375 bp, Bos taurus
  Clone ID: 10-LIB34-061-Q1-E1-C5
tacatttccttctgcatggaacttggtgaggcaaggtcatttgtccagtttcaatagcctaaagcatggttgccctttgttttttgaatgttccaaaaatgtttagatcaagtgatcaggaaaaagctctaaatttctacttttgctaattttatgacactggccaaattagtattacttaacaaatcagtgatttgttaagccatttttaaacttattactatttctttgacataaaatagtgtttcagacagcattttaccataagtcaattcacacaattttaggaaaaccttctcactgtcgcacaacttgtattgtacattatgcatcagataacactagatatcaatacttcatgtctatactcataaa

SEQ ID NO: 4580 - DNA, 248 bp, Bos taurus
  Clone ID: 10-LIB34-066-Q1-E1-C5
cgccgttccccggggcggtagggcgagccccgcagctaggtgcggatgggagtggctgagtcgctgaggaacagcccgcgcgtcgctgggtctgaaggtgttgggctccacagcacgtctggtctgcgcgagtcgggtcgggctcctgcgcccctgtccccgcctccggcagaggggtggtgggcgcagaaccggtagcggcgggagctgctgggggagcacgccgggggctggcgaacacggaatgg

SEQ ID NO: 4581 - DNA, 195 bp, Bos taurus
  Clone ID: 10-LIB34-067-Q1-E1-C9
gcgggacctggacacaattgaacggcacaacaatttgatcacactaattgtcagcatagtcatccacgaagtgtcacagtacaaggggccgctgtacatagaattggtcatgattatcaccgtaataccacaagtcactgtcgatgattaaagtggccggatcattccgaatattcacagttctgggccactatc

SEQ ID NO: 4582 - DNA, 241 bp, Bos taurus
  unsure (196),(219),(231)...(232): unsure at all n locations; Clone ID: 10-LIB34-069-Q1-E1-C9
accgcgctggtgcagacagatgccacggggcgtgcgggacgtccacactccatcacccacagagagtctgacgtcccccgccccccggcatggccccctccaacctgttgggaggccgcacagaggactcaggtttagcccagacctggcctctgccttcactaacaggcccttggggaggcagcaggggctgcantccatccagccggagtggctccnctccctccgtgnntggtcggca

SEQ ID NO: 4583 - DNA, 405 bp, Bos taurus
  Clone ID: 10-LIB34-076-Q1-E1-C9
cgacccaaacgtcagcagacacgtgggatagtctttcaggaagctctctaaggcccggcactacctgaagaggactatttattatgactttgtacttttcttcttaatttaacgtacctttagtatggattccatttatatttgtttttaaaaccctgtaaataagaaagtttgaattcaaacagttgtgttgttgcaagggtaattcaagtttactggtttttacatctgcaatgatgtgattccttttttttgattctgtatattcagaggtattgaaaaaattttctgttaccaaacttacttctattaagactcatataagtaattttatgtaaactgatgaaaagttacttgtgctgattaatgtattctagtatgttacagtttacaagttttaatcgt

SEQ ID NO: 4584 - DNA, 443 bp, Bos taurus
  Clone ID: 10-LIB34-078-Q1-E1-C5
agtcgtatctaggaaggagcactgtccttggacagcaagctcatccccacccatgaaactaccacttacacttcaggccacagtctgggggcatagcctgatgctaaggagaaccagacgcagctgacagaaaacaggggtcctcaggctgggacatcagccacagtccctgtgctgtccctcttggccatcgttttcatcctcgctggagtcctactctacgtcgtgtgcaagcggaggaagaatcagctcctacaacatctcccacatcttgcagcttcattatatacctgcagcagacgaaccagggtacagaatggaaccttgtgagggcagattgtgatttattcatcatgaattaatatactaaaacaatttttggtaaacactgtacttattggtcagtgtttaattcataactaaccagcctattgatctacctt

SEQ ID NO: 4585 - DNA, 432 bp, Bos taurus
  unsure (342): Clone ID: 10-LIB34-082-Q1-E1-C9
agcggacgcgtgggcagcctatggatctggtccaaaagcttttgatctgttcaacccaaacttcaagtctacctgtcaacggttcgtggagaagtacattgagctacagaaacttggagaaacagatgaagagaagttatttgtggaagcagggaaggctttgttggcggaaggtgtcattttaagacgagtagaaaaagcaaggactcaacaggaaggtagtcaagtgtcccggaaatctgaatccatgggtgtcgaatcccaaactgcattggaggagaacccgcctctgaaagaagttccgcaggcccagcatctggagtcacctggggaagagtccanaggcctctcacctccctgaagaatgtgtaatctgtgtatactgccatccaagctggattcactactggaatgttgaactgttttaacagt

SEQ ID NO: 4586 - DNA, 358 bp, Bos taurus
  Clone ID: 10-LIB34-085-Q1-E1-C5
agcatgaactcatattcagtcatgaatctgaagctgccacctgcaaatatgctgtggtgaccctgatggactcgctgaacaacgctcaagcacaatatggaagagcttcatggagatttcacgagtttgaaccaacatctgtaatactctcttactatagacagaagactgaatcacgcctcagcctaggacaacggttcaatgtggctctccacgtcacttacgtctacactcatcatctccatgtgtctgaatatatgaggtcacataacgcctgccagccaaaatcacaactgcggcaactccacctcatattcactgcttgaagcctccgcatatgcccaatctcgataccacc

SEQ ID NO: 4587 - DNA, 378 bp, Bos taurus
  unsure (338),(340),(342),(344): unsure at all n locations; Clone ID: 11-LIB34-011-Q1-E1-C3
aggacgcgtgggttttgagaatttatggcttcctgtatcggcactggagtggttggttgtgaatattaaaacctactactgttttccctcaataacatgtaatagctgtgttcttgcttagaaggtatggttagaaaaatgtgaacgatcacttaaaccaaagccagttataaggagtattctctcctgttggtttaccttcacctcagaactacaaatattacagtacacaacagctgtctgtaacatttctaccagttgtttcagtggtatttcttggcatttcttggcactatggttctctgttctcggtgatgtcctatttttttgtgattaananananaaataactgagtgggactataaatgtagatgtgt

SEQ ID NO: 4588 - DNA, 408 bp, Bos taurus
  Clone ID: 11-LIB34-013-Q1-E1-C11
gtcgacggacgcgtcagatattgactagggaccacctcatcccagggactataatatgtaaaatcccttaacagagacttctcctctagacaggcttatgtgcgtactaccaggatttgccctactaagtctccttttgctatgttctgtggctgcagtatccctttctgaaaccaattttatattaatatattatatataagggtatggcttaatcttgttgctctgtgaatcattatgtctctttatattgactatgaatatctcttttcgattttaaactgagtttacagtttagctcttggaaggcaatctatttcccttatttccaagttcttagagagatatgcctatagtctacagggccaacaacaaactcatcataatttcattttcaaactcttgcat

SEQ ID NO: 4589 - DNA, 122 bp, Bos taurus
  Clone ID: 11-LIB34-015-Q1-E1-C3
ccagtcgtccgggatgttcactaatttgttctggaataagtgtaagagcatcaaaggtccctgactcataagcaccctcgacaccacgttgacagtatctgccgcaggatcgaacatgagaa

SEQ ID NO: 4590 - DNA, 77 bp, Bos taurus
  Clone ID: 11-LIB34-016-Q1-E1-C3
ggtccacgcacgcgtccgtgcagaaccatgggaagcagcatacgagcgactgcacagcacggtacgtccgcagtagc

SEQ ID NO: 4591 - DNA, 373 bp, Bos taurus
  Clone ID: 11-LIB34-018-Q1-E1-C11
taaacctgctgctccacctacaaaacctacacaatggaaaagccaaactaaagaaaataaagttgggacttctttccctcatgagtctacatacggtgttggcaactttaatgcttttaaatcaactgccaagaattttagtccatcaacaacttcagtgaaagagtgtaatcgctcaaattcttcttcacctgttgacaaacttaatcagcagcctcgtctaaccaaactgacacgaatgcgcacagataaaaagagtgagtttttgaaagcattgaaaagggacagagtggaagaggaacatgaagatgaaagccatgtaagctcagaaaaggatgacgactcatttaatttgcataacagcaatagtact

SEQ ID NO: 4592 - DNA, 431 bp, Bos taurus
  Clone ID: 11-LIB34-021-Q1-E1-C11
gttcatctaccttcccatgagctacctgcccagcttcctggtggatctcatggtgtactggagaaaccccaggcctgcgaaggccctgtaacccaagactggggtgcattgtagggggtagttgcgtacagaatggggagaggatgcatcgggggagggaaatatagtggagagtggagttttcatgtcaccaggacacctttccatctcactcccatctcctccccagtctccttttgggacattacttaggactcgaggatagaaggaagaaacatgttttgtagtgagaaactgagatcagtagctcttatctgtgtcctgttccttcatcagcctctcaaggctctgagccttatggccctcctgcaaccctgaggaatccatacttaaggggagggttgagcagccaggaaggtccagacccctgc

SEQ ID NO: 4593 - DNA, 188 bp, Bos taurus
  Clone ID: 11-LIB34-021-Q1-E1-C3
gagggacttccggcggcgccgtattttttttccggttgctggctcctgccggcccctcccgtactgggccctgcgcccaccaccagcacatctacatcggatcctatacgaagagctggaaagcatcagtataactagcacctgaaagatcaaacgggtcatcaatttcaatcatggggcacacatct

SEQ ID NO: 4594 - DNA, 255 bp, Bos taurus
  Clone ID: 11-LIB34-022-Q1-E1-C3
gggtcgacacaagcgtctagaattagtcattaaaatttattctctaacatggaagcttctacttataagtcactaacataatcaatcatgcacaatggtatttcaaacaatatagctttataacaaaaatctgttcaacattatcaaaaatgtaaagaagaagaaaaaacttctataatctcaaaaggttttgggatttgatctttttaccttattttttaaaaagagttgaaaataatcaaaatttaaataaaa

SEQ ID NO: 4595 - DNA, 62 bp, Bos taurus
  Clone ID: 11-LIB34-024-Q1-E1-C3
tcatagtacgtcacaatactctagactgagtcatactaccgcttttctaacacagaactttt

SEQ ID NO: 4596 - DNA, 394 bp, Bos taurus
  Clone ID: 11-LIB34-031-Q1-E1-C11
gtctgatcacattcgagagatgaagatgagccaagaatccttgctgagaagcagattgagccagctgtgtgttgtcatggagactggggtaagccccacagccaacgaggggccagagaacctgctggaggaaactcctctcctgcccgaccgtccaggttccacggagaagccgctcatgcagactgaacttcgccaacttgttcctgaagctgagccggaggaaatggcccagcagctgctggcagtgtttggtggctactacacccgcctcctcgtgacctctcagcttccccaggcactggggacacgacacatggactctccaaggattccgtgcccctgccagctcatagaggcctacatcctgggcaccgagtgctgcccattcctg

SEQ ID NO: 4597 - DNA, 376 bp, Bos taurus
  Clone ID: 11-LIB34-035-Q1-E1-C3
ccacgcgtccgcaattctgtagaaagggctgactggcattctacatctcgttcatcacgagctccagcatgttctgctgatgctcacagacatggctgtatctcaatgatcacatctcacttaacgtgatgtgagcaaatcatgatcgctgtgtgttcttttcttcataaatcaacatattgcgctatctattattatggagaatcagatagcacaatatttgtcctaatgatgaaatgaatatcttactgtcatgcgctatgatgcctatgctaaatcacatcataaactacatggtgagctttactgataaggcatatgttaggatttaatggtcgattggatgatccctcgatataaaagttctgaaaatgtt

SEQ ID NO: 4598 - DNA, 423 bp, Bos taurus
  Clone ID: 11-LIB34-037-Q1-E1-C3
gttattttctctgattgtatcgatatgactgcagctcagtaaatgagggcttgaaatccagccagaaagacctgaagctccaagttggtctgcaaatggaacaagggagaatcatgcaatcagagaaaataactatcccactcttttctactctccaggcttccatgttcaaatccccctttagtctctggccttccactaatggactaagtgacttgggatcattgagttcctatgtaaatagagttaggagtgaatggtctccaaggtttcttctggctctatctctgtggtccctcgctggccatttttctgtcttcatgatgacatttagtgggagatgcagatttacctactgacttttcctgtactttcctcatttgcctgtgttcccgcaagacatgtggtgagttcgaacaattg

SEQ ID NO: 4599 - DNA, 372 bp, Bos taurus
  Clone ID: 11-LIB34-045-Q1-E1-C11
acgcgtccgcacagtaagagtccaatgagtgtattttataagatatgacaaggttatttgtcttcacagaccatgagccatatcagttatgtagtaatctctttaacactgaacatgtcagcgttctcacaagagttctcttttctttctaatcatatacaatgccaactttttagatgtagccatgttccctctttttcaaataaagcatctcttctgttcagatgcatgtatgatctaatttcgttttttttttttagaaaagagggaaacagttttattagtgaataagcacaagggcatattacagtatgcattgttagcaatccaccaagttaagagagagaaagaaattctagaaattcagggtag

SEQ ID NO: 4600 - DNA, 210 bp, Bos taurus
  Clone ID: 11-LIB34-059-Q1-E1-C3
ataaggaacctgagctatttggaacccctggaaagccatctagtggtgtccaacctgataccatctgcctgggagcatacaaaccagtcaactttcagtttctttcaggccaagagcatcatgcacccttgggtagccatcctgggcctcctactccttctgacagatggtgtaacctctatattctcaatgtgactgggaagaaccggc

SEQ ID NO: 4601 - DNA, 406 bp, Bos taurus
  Clone ID: 11-LIB34-061-Q1-E1-C11
ttcccggaagcccccacgggcccggaacgtccacgactttgcacccgccttcacacttaaattccgtgactgcagggcctctctctgagattctcggacacaagccgacattctcggcgaaccgacggggcccagtggccttcacgctctgcggctctgtgatgccgggctcatcgattcgctgcgtttgcgcctctcactatgctggtggtcactggggtacacatgccgctcatgaccagggatgtgaagcccggtgtgatcaggggtgttattgggacgcaggcccatcattggctcagtcattgttgggtagcctgggtacaccatgatgtgtcgaggtgctactctgacgaccactctgacacactacgctaagctgcaatgtggctgggggtgatctctg

SEQ ID NO: 4602 - DNA, 190 bp, Bos taurus
  Clone ID: 11-LIB34-062-Q1-E1-C3
ctatatgttagatactatcataataatttgtatttcttgaattattctgcaaaataaaaggttggctaccagcattcacccctcactttactgctgcagtgccttgctttgatttggttgtacatttttctgcaaatgattcagatctggcccactgcctgcaatgttttacctttatgaatggttgaaa

SEQ ID NO: 4603 - DNA, 267 bp, Bos taurus
  unsure (82): Clone ID: 11-LIB34-064-Q1-E1-C3
ctttttcttatttttttttgaaataacctaatttccttaataatagggaccatatgaaaaacctttcagtcaggaaaagtgnaagagtcttaatgatctagcagacgtcaatactctgacttactagggtgactcacaagtttcggaatgggaaaataaaattccttgtatcatttcgcgatcttagtatatgcaaatacagctagtttgccacataatacagatagagctcttgggagaagcattaacacgtgttctacatcgcga

SEQ ID NO: 4604 - DNA, 199 bp, Bos taurus
  Clone ID: 11-LIB34-066-Q1-E1-C11
agaggatccgagagctgcagggagccgtcttggttgcctcctgtgtccagatgctggtgggcttctcaggcctcattggcttcctcatgcgcttcatcggccccttgaccattgctcccacaatctccctgatggccctgcctctcttcgattctgcgggtgacaacgccgggatccactgggggattgctgccacgac

SEQ ID NO: 4605 - DNA, 255 bp, Bos taurus
  Clone ID: 11-LIB34-066-Q1-E1-C3
atcggcgagcggccgccctttttttttttttttaaaagacagtgacgttggttttatggatcaaaaccagaattttcatgtttcacaattttggtgctagagatccccaaattgcctaactcactggggaaggtttctgaaggtgtgcattatagtaaacagcagcaaaatacccaacaacgttactgctaaaagcagctgctcctgcttgcgcctttagaatactagccgtaaaacagcaaaaacccgcacatc

SEQ ID NO: 4606 - DNA, 156 bp, Bos taurus
  Clone ID: 11-LIB34-068-Q1-E1-C11
ggcaggtgcgggttcctctaggcgcttctcagttggttcgccggcttcctcaggtcctacaccgcggggaccgaagcggtgtatgccacccgagccgcagaactgtcaccggccgggggtccatgagggattaagaggttgcagagatctcagcgg

SEQ ID NO: 4607 - DNA, 231 bp, Bos taurus
  Clone ID: 11-LIB34-070-Q1-E1-C3
cggacgcgtggggtcgtcgttgtggttgaaacaccgcggacgaaatgccagagcgagatagcgagccattctccaatcccttggctccagatggccacgatgtggacgatcctcactccttccaccaatcaaaactcactaatgaagacttcaggaaacttcttatgaccccaatggctgcacctacctctgcaccaccctctaagtcacgtcaccatgagatgccaaggg

SEQ ID NO: 4608 - DNA, 86 bp, Bos taurus
  Clone ID: 11-LIB34-075-Q1-E1-C11
ttctcaatggagagtcgtattatggttcgttgcgggctgtgcggcagccgtctcgtgttcgtccgttgtccgtgcatggtgggccg

SEQ ID NO: 4609 - DNA, 416 bp, Bos taurus
  unsure (21): Clone ID: 11-LIB34-082-Q1-E1-C3
accatctaagtcatataacanacattcatcagtctaaggcataatttattcaaattatttaaaaataaattgatgcttggggaatgataggaaaaatgtaccatagaattttccatactgcctctcaacataattgccatatttaaaaaagatagaattaatatggtaccatagtagataatattattaaatcacacatatagttctaaataattttccagaaatctatcctgcaacacttgtaacaaaaaaaagcgtttgtcattactgtatagtgagaattactccaaaactccaacaaaaagtcaaacagtccaatatgaaaatagatgaagatgaataagagtcacagaagtgaaatggccgatgacatgtagaaatggacaaaagtcactggtgctttggaaatggaaact

SEQ ID NO: 4610 - DNA, 350 bp, Bos taurus
  unsure (297): Clone ID: 11-LIB34-083-Q1-E1-C3
actggatgaacgcgcaggttccacctggaagtcaacatcatggtgtcccccgtggtgtacttggtggtggcggctctgcttgtcgggcttattctgttcctgactcgcggccggggccgggcggcagcagctgcccaagagcctttgcacaatgaagaggtacccgcagcagcaggccgagtggctcggcctcagcccttagagcccgaggagcagagagctgcaggcaggccccggcgccggagagacctgggcagccgcttgcaggcccagcgtcgagcccagagagtggcctgngccgatgagaatgaggaggaagccatcatcaaagcccaagaagaagaagacat

SEQ ID NO: 4611 - DNA, 303 bp, Bos taurus
  Clone ID: 12-LIB34-010-Q1-E2-C7
cttatgtcataagatacattcccaacacaattaatcagctccagcgaattttactggtctaacacatgcccagtcatctgacctcgtgtcacattctgcatctgaacgtcaactcttcatcctacatgattccactggtgagtgtcatcaatattaagcagcaaaaatccattggagtatatattagctttacatacacgatcttcgcatctaatcagcacggatctctgcgatcatgctacactgccactgagtagatgtgatcagatgtatacactacaggattgagtcaacgactgagag

SEQ ID NO: 4612 - DNA, 411 bp, Bos taurus
  Clone ID: 12-LIB34-012-Q1-E1-C11
attactcttgggttttgagcttatgattcaaaatggggaatacaagagttttttctgtatactgtatttttaaaaaaagaaaaacatttgtgcaacgtggccaaacctaccaattttatgcattgactctgaaaaactgaatgatgtttaaagaaggacctgaaatgtaagtgctggttatttttcttctggggtttactgatcagtgtgataatttttaatttcatttagtaatgactctagaagattttaccttgacatatttttcatgacgtttcatgatttgctgttggtttcaaatgaaactacaaatctggcatgttttactgtgaacactattttgtttgtttgtttgtctgtttcctttttttttggtcttgttttttctgtttgactgtcttatggaaaaag

SEQ ID NO: 4613 - DNA, 349 bp, Bos taurus
  Clone ID: 12-LIB34-015-Q1-E1-C7
ggagaatggctcttaattttaggttaggtcgagaaggacaggtaagcaagtgggctcagaattctgcacgcagggaagatgtgtctaaggagctcagcttggatgactgactcagtaggaagtgggacgctgaggccgggctgtgagggaaggtcctgcctgcgcaggtgaagcctggtaataagatcagattacataatgggttttttgcaaggctggttggctgtgagtcggctcagcactcggcattcaagtcttccctcccaaatccaccacctggaatccaccgccatcccctgggcctggcccacgacgttgacagcagctcggagcgcccacctctctcatg

SEQ ID NO: 4614 - DNA, 386 bp, Bos taurus
  Clone ID: 12-LIB34-032-Q1-E1-C11
tacaaagctcggcgccgagcagctgatttccctttcccggagccggtggcggggcttggcgtctcgctcctctcttttccccgttcacccggccttccgaggggcacctgcgcaggagtctgaaaaatccttttgcagagttctaggatggagactgaagggtatccagagatgcaaagagatgtagaagtccagaatgatgaaataaggtcaccaccaaatgagaggatggctgaggagccagaaggcatcctgatagcaccgccccaggtccaggttccgccagagagcctggatgaagactctgaagatgacctggagaccatgccccgaaggagtcctctcaaccctgcagcctccaggcagaggttccggcagttccgcta

SEQ ID NO: 4615 - DNA, 264 bp, Bos taurus
  Clone ID: 12-LIB34-041-Q1-E1-C7
gactcgcgggtcgacgcacgcctctaaaggaagtcgtattaagtagaacttgccacaatgcagccacagagtccactttgacagaatactcagagaccaccatacgaagacagcgggaataagacttttgccgccgcgcactactctggatcttgaagagaaatgcgaaacttaccacctcagtatggaaactctcatggataatgaggtccaccacctttccagaacgaaggacaccgtatctgcgcctagacatcaatctgt

SEQ ID NO: 4616 - DNA, 60 bp, Bos taurus
  Clone ID: 12-LIB34-042-Q1-E1-C11
ccggtcgacgcacgcatccgatcggagcacatcgatacggtgcagcccttggttgcttga

SEQ ID NO: 4617 - DNA, 137 bp, Bos taurus
  Clone ID: 12-LIB34-042-Q1-E1-C7
agatcaatgtccttctcaccttgtggttttacactgctcatggacacgggaaacattgtaattatccagtagtaagacatggccggctatctcagtcagacaatgggtagcgttccatgacgcgtccatcaacagtt

SEQ ID NO: 4618 - DNA, 433 bp, Bos taurus
  Clone ID: 12-LIB34-044-Q1-E1-C11
actcgcgggccgacgcacgcgtctactattactcaatgggacttagatgggttcagtgaactggactctgagtcaggaagttcaagttctttttctgatgatgaagtctgggtacaggtagcccctcagcgaaatgcacaggatcagcagggttctttgtaaatattttgaaatactaagatgtttctattgctatgaatatatcttaaaaagatgtcctttccttttctggggaaaaaagaaaactttgattaggattgcatatttggtttagaaagggtaatgtttgaattgctaatgtaatgttacaaaatgtaaacagtccatgaaataagctatataataatttactgtgctgaaagtggagattaaaatatgcaaaaaaaaaatgaaccatgtaattgatgagaatgcttgctggtttttttccgtg

SEQ ID NO: 4619 - DNA, 401 bp, Bos taurus
  Clone ID: 12-LIB34-045-Q1-E1-C7
atgcagttttaatagatccatttttcatctatgcctcttaaaaacttgtatgcttacgtaaacatacttaagaggtcatttttctttaacagatttcatttcttttcttttcatttaaaggtggacaaagctacctccctgagagtaaatacaaaaagaacttatttacacagggacattttaagactgttcttaaagtaaatctgctggccacagaatgtcagcaagtacgcagtgtgagctagcaattagagaccaagtttaagcagatggctgtagtccaaaaaagagacagattacacctatgcaggtcaacatttggaagctctctcgtgcttctcccttttttgtcagcccataacagtgctttcgtacgttattcggtttctgatagagagttt

SEQ ID NO: 4620 - DNA, 194 bp, Bos taurus
  Clone ID: 12-LIB34-047-Q1-E1-C7
aagcaaccagatagatttcatgattacaacatactgagtgtccacttcacatgaatgataagacgtgaaagcactacagcacagtgagtcttccctatgaggcagtgtagagatctgtttaagaacggcctctgcgcagtatgaaacaggtcagcccggggtgggatccgcaactgtgggcgaagatgacacat

SEQ ID NO: 4621 - DNA, 229 bp, Bos taurus
  Clone ID: 12-LIB34-051-Q1-E1-C7
cagaaaaggattatttttagtctctccctcccagctccaatagactagttgggtacctcactccccgagtcggaggtccttccccgagcccccatgtagctgggaagtgggacctgggggtggttggacccctgggatcctgaaggagggccagagagggcgcagaactccgtttctgttcctgttatccggacgcggccccctccgcctctcctcccgctgccatgca

SEQ ID NO: 4622 - DNA, 240 bp, Bos taurus
  Clone ID: 12-LIB34-052-Q1-E1-C11
ctcaggagccacgacaagctcatggaaatccacactcaagagctgacaggcgagcagatacctatgtggtacagatttcaccagagactactacagacgacaacaaccctggcccattttcagaaacagctgtccgcagagctttcatcgtaaaagtgttattcctcctgtccattcagcttctgatcactggggcaatcgtcagcctgtttgttttctggaaggctttacgatcttggg

SEQ ID NO: 4623 - DNA, 237 bp, Bos taurus
  Clone ID: 12-LIB34-054-Q1-E1-C7
attatttgttaaatgctggactatattaggaaaatgttttcagaaatcattttaagtacatagatcagtgtttcttacaggtaaaatgctaaaataagctgcctataataggtacgaattatatttttgagttttgtagaatattacaaattaacaaaacaaaaagtgtttaatttatgcaacaaatatgttcacacaaatttggtaggactttaaaagaatcaatgtttgacagat

SEQ ID NO: 4624 - DNA, 248 bp, Bos taurus
  Clone ID: 12-LIB34-058-Q1-E1-C7
gtgggacgcgtggttcaatacaagactctatagtgagtcgtattaatcggtatcgagagaataacacactaggtgagaggtgaaagctcccaactatgttttcattgatcaaatcaagacactgtctgcgagtacacagcttttttaagtgaagttatcggcattcctaatccagctgtacgatattcagaagcgtcgatcacattgtgtgaacaatgttacacagtattgtatacctacaaatctgg

SEQ ID NO: 4625 - DNA, 234 bp, Bos taurus
  Clone ID: 12-LIB34-060-Q1-E1-C7
gactagttctagatcgcgagcggccgccctttttttttttttttcgcggtctccagccttttattcatacgaggactcgaagaacacacgtcacctgcggacgccgtgcagcccgagacacagctggcagggccactgaccacacagggccgccccgtccagagacgaagggagggcgggcccgagtggctgtccgggcacactgcccccgggctgggagtccagctggctccc

SEQ ID NO: 4626 - DNA, 90 bp, Bos taurus
  Clone ID: 12-LIB34-065-Q1-E1-C7
gttctagatcgcgagcggccgccctttttttttttttttttgctttgaaatttagaaacaaattttatttaagatctgaaatacgattcc

SEQ ID NO: 4627 - DNA, 250 bp, Bos taurus
  Clone ID: 12-LIB34-066-Q1-E1-C7
cggacgcgtgggctgaggcaagagcactcagggtgaatgtagtcaggtagctttcaaagtgatcaaagtgttttctgtggtgaggcctttattatctggctggatgcagagtatgttgaagtggtaagtcggtgataagtttttcatcattaaccttgtttgcacttttgtacaccactgcttgcactactatcttattgtagattttaacaattgttttacagtgtatacagattgttaagcattaatt

SEQ ID NO: 4628 - DNA, 221 bp, Bos taurus
  Clone ID: 12-LIB34-067-Q1-E1-C11
ggtcgacccaagcctccacagtgactcatagtaaagaactcaacagttattccattcctttcttgggagcagatgtgtctgttgtgaagcggactcagcgttacttgcatgaaaatttagagcagtcacctgttcagtatgctgcttatataaatgtgggaggcatcacttctgttattaagctgatgtttgctggactcttctttttattctttgtgagg

SEQ ID NO: 4629 - DNA, 75 bp, Bos taurus
  Clone ID: 12-LIB34-070-Q1-E1-C7
gttctaatccatcagcaacacctgtcagtgtgtgtttccaggatgccttacctctgcagacaccacttcctggtt

SEQ ID NO: 4630 - DNA, 374 bp, Bos taurus
  Clone ID: 12-LIB34-071-Q1-E1-C11
aggaaatatgttgcattagagtactgctctccaatattttataatgggttccattttcactctggaaatttctatcttaatgtatgtgagatattttttaaacagtgtcctaacatacctagatcaaatacagataccatactatgtatttcatctaactgtaaaagtcttcactctgtaatattctggattttattaaaaattcatgttgggttcttcacaaatgagaacttgttcaaaggacttataagaactggtattagtttcattgaaaccttttgtttcaccactgccattgtttttttttaattcttggtgttgtgttcctttcttttctctgtcctttttgtctgcttggagatgagttttgaaaa

SEQ ID NO: 4631 - DNA, 165 bp, Bos taurus
  Clone ID: 12-LIB34-076-Q1-E1-C7
cttaaattccagaccgtcgcggcagcgcagttcatcagccacgtgtaggattttcctcaggtgatgcattaactcccagattctcaagctgaagacatgtacttcattgggtctctcctcggagcagggaactcatgcgaccaggagtgtataactttacatttt

SEQ ID NO: 4632 - DNA, 401 bp, Bos taurus
  Clone ID: 12-LIB34-082-Q1-E1-C7
acaggcctcccccgccactctgggccttctgagagccatggaaacgaaagctgtccttgcctcttacctccagttctgttattgggccaaatggagaacccgcagccctggtcatccagagacaggggaaggggaggaggtcgagggagggctccgtctcccaggcctctgccagctggggcagcaatcaatgggacagtgttgggctttcacgtggcttctgggacctggacggggctcaaaggggctctcacctggatcagatatcaggttggttcaaggtctccgtgtggtggagatgggactcatccaccctggggagacggcctggttggggataggggggtaagaagggttggcaggtgtagaaaggggttgttaggcatgagatggacatgggg

SEQ ID NO: 4633 - DNA, 413 bp, Bos taurus
  Clone ID: 12-LIB34-085-Q1-E1-C7
agggtctctgtgacatccagcacacgggcagagggagactggcagtatgagggagaacacggtaagaagtggtgctcactttctccatccccccgacatgattctgctatgttagaagtgacagccagtggtcacagccagaaaaacattgtttgcagtgacttagcttgcttgtgacattcccgcagaccactgaaccagacagctcgagctgaaatcattgctttactttgtatttactacagtgtgagtcaattggttccatttcaggtttctgcttaaattcctggtactaaatggaagtgtgtctggttttaaacttactgagagtccttattagtataatccctcttcctgtaaacttacagatttaaaagtcattgaggctgcattaggtgacaggaaaacattta

SEQ ID NO: 4634 - DNA, 405 bp, Bos taurus
  Clone ID: 13-LIB34-021-Q1-E1-D1
gcgggatggtcccccggtgccaggtggaagtgttgtattttgcaaaaagcgctgaaatagcaggaattcgctctgagaccatttctgtgccgcaagaaataaaagcattgcagctgtggaatgagatagaaacacgccatccaggattggctgatgtcagaaatcaagtgatatttgctgttcgtcaagaatatgtcgagcttggagatcagctcctcctgcttcaatcaggagacgaaattgccgttatccctcccattagtggagggtaatacttttgagccacctggaaaagatatgaatgaaagttgaagagaaatctaaagatataaataaattcacatctgagaaactttcagtagatgaagtctcacagctggtgatttctccactctgtggcgcaat

SEQ ID NO: 4635 - DNA, 410 bp, Bos taurus
  Clone ID: 13-LIB34-021-Q1-E1-D9
cagaagcgtgggctattttggaaaggatgggtcaggtgctttgtccccatagtcgtttgaagtgcctgcatatgaacaaagaaacggttctgttttaaaaaaataggatacccagtccatttttcaagaatgttttgttttaagccatacagacacaggttatacttttgtcacattttcctagccagaattttcaaggagagttaagataaaaagactggctagaaagataattgtgttgttcagatctcatattcacctttcgtttatgaaattgttacctactccttcaatgcagccccttctttttgtctcttaagtgcgtgcctctgggcaaacttatttatttttattgtttcagggtaacatttacaatgtgtaaataaataaatctaacattttgacttcct

SEQ ID NO: 4636 - DNA, 355 bp, Bos taurus
  Clone ID: 13-LIB34-023-Q1-E1-D1
cggggacgcacatgacacacaaatgcacagcgactgtagctagacgtctcgtgtccctgcacgcagagcacaatgccagagcccgacagcggggctaggccggccagccaccacgcggggacacaggcagctggttcctggttgggtgctgggggagtcagtaatgcagctgttctcacagacgtgtggcttagccacacgtggacccggtgtttgcacgttttcgccacgcagcacatcagggatgcagaccgcatgtggggcactgccggagctccccggctctggtgtctgaacccaagccgctaaatggggaccatgctttccgcctcaagcggctcccctcgtctcgccc

SEQ ID NO: 4637 - DNA, 137 bp, Bos taurus
  Clone ID: 13-LIB34-023-Q1-E1-D9
ccacgcgtccgtaacgcagggacacaggtgtcgtgataaccaatgttgaacctaagcccatcttggactggacaagacgcacagctgtagcgttgtcattgggcacgtagagtcagggaagtggaccacgagtggcc

SEQ ID NO: 4638 - DNA, 329 bp, Bos taurus
  Clone ID: 13-LIB34-025-Q1-E1-D9
gggtcgacgcacgcgtctacactgagtccgtggactggacgccgagggcggctggaggctgcgggagttttaccggacgtgtaagctttacactgtaagcagtgtgagtttaccgtgtgagcagtgtggcctttgacggcagcgctggggcagtcacaacccagccccgcgcgacctcttggggcctgagatgccccgttggtaaagcggaccgagaagttccagattccgggtcgccttccaacttgaccctggcctgcgaggtgaatgcccccgtgtgtaagatgcacccttgagatcgatagcaacagcgccctcagcttcaattg

SEQ ID NO: 4639 - DNA, 329 bp, Bos taurus
  Clone ID: 13-LIB34-027-Q1-E1-D1
cggacgcgtgggtgcggcctggggccatggaacagactgtgtcctgagtttcctcaggtcctgggtaatttatattttaatgtgccaatgcccacagggactctccattcctgtgtggcagcatcattgaaagagaggctttgaacctgggacccacacccaggagcaaagtcttgtcctttgtctgtgttgctccccggaccataagccgagggtcttcgatgccaaaccagacagcagcaccctgctgtccttccccacttgtccccaaagtgccttccctgaggcctggtacaacctgacctgtgacaggaggtgagtgcgaggga

SEQ ID NO: 4640 - DNA, 75 bp, Bos taurus
  Clone ID: 13-LIB34-028-Q1-E1-D1
gacaccccgaagtctatattttaatcttacctgggtttggaataagtgttgaaacagtagtggggctcggatcct

SEQ ID NO: 4641 - DNA, 359 bp, Bos taurus
  Clone ID: 13-LIB34-032-Q1-E1-D1
ggaagtggtggttgttgtggcccagtctggaggcattgggtacagaggctgtagcacctggggtgggctctgcctgaagaccgctctggctcatctcactcacagcataatccctaggattttactctggaaggaaggaatgcatcgatggatgggtgcccccgtttgctccttagcatcatcacccaacccacctgcctgtgccacaccttctagccacgcttggagcaggaaccttgggcatctcggcctccgtttccctacctgttgccttttcactctgtcaactgtgtcctccgatgtacagtgtagaacgcttaaggtcattagaaaccactgaactaccctttagtcaagaa

SEQ ID NO: 4642 - DNA, 399 bp, Bos taurus
  Clone ID: 13-LIB34-033-Q1-E1-D9
aaagtacatacagcatgcccttctgagttaccatatctaaaaagcctaaggggaaaaataatcacacctctccactttacatcacaacttctggctgacctgtacacccttcaactacactacaaagaaaaaaaacctaggtttcccacagaggtaaccacaaaatgccccacattcaagtgaaacaacaagtacaccacacgaactctcccaagagttgtgatcagcttcacaattttatggcctaagttctgtagtcttgaacacaggcaagctttcataccaagaactctcaaatgcactgcctgctaatgcagattcccactatcaaatgccacactctgaggaagcccaatctgttccgagttctgccaattccgccttcctcaaaatccctga

SEQ ID NO: 4643 - DNA, 435 bp, Bos taurus
  unsure (394): Clone ID: 13-LIB34-039-Q1-E1-D1
gtttcctcctattcacttttgatctagatattggtggttatgttccagtcctcctgcatatgcccaagaggattgggagtggagtgaacaccagcagaagcaccattttttcctgtagagattagagacaaggagcttattgccctgcttgtcaaggctcaggacagagaggaggaagaaacaagtataaaggttttggctttggaaagaagctggaatctcctgaccctgggaccttaagatccacaaaattgctgaaagaaaaagtactaccttattgaaaggatgaagaaactcgaaaagattatgactacatgctggattcaccagaggagtactacagccattactaccactactacagcaggcgcctggcccctaaggtggatgtganggttgtgattttggtcagcgtgtgcgctatttcagtgtttc

SEQ ID NO: 4644 - DNA, 423 bp, Bos taurus
  Clone ID: 13-LIB34-039-Q1-E1-D9
ggggccgggccgcggggctccccgctccctaccaccgtccggatccgcctcccggggcctccccggaagccagggagggcgcgtgggccccgaggaattaaagctggattgttgacgacgaacggacctacagttcctggtgtgtgatgagagagtgggatttgctgtcctgaagtcactaagcttggaccctggttcctcttcatgggagactaaagagatggaagacttaaagtctgagaataaaaaaagggtgctgcccacatggatgacagcccaggtggctgaaaagagggcaccacaggtgaagacccccaagaggacaccagccacggtgccagcggctgcagccagatttcctgccatgaggactgtgtactgcatgaatgaagccgaagtcgtcgatgttgctctgggggatct

SEQ ID NO: 4645 - DNA, 434 bp, Bos taurus
  unsure (265),(378): unsure at all n locations; Clone ID: 13-LIB34-048-Q1-E1-D1
ggcatttaaatatttcataaaattatgcacagatacacgttggagtccagagctcagttaagtgaacagcaggctggtgagagaggctcccccgtgtccctgactgcctttagtaggtggcaccaccctgtgcacagagcactagggaagagcggaactccagcctcgccgctgaggctggtttccaccgtgccgggctccggtcatgtctcctcccaacatggatagcagatgggtcactgtggaggagttagttctagcctgngttattgttactgtctttactcaataagttaccaatttcagcccgtctttgcttttatgcagttttaaactttgatttctttctgtagcaccttcttcattttcagttgtaanaagtgactttcgcctcatgaaagatttgagtacatctcccatgttgtcacacacta

SEQ ID NO: 4646 - DNA, 371 bp, Bos taurus
  Clone ID: 13-LIB34-049-Q1-E1-D1
aggcgtttaacttatcttccacattttaggtttttattctataagtaagtattaagatgtgcataggttctaccagaacattcagtgctactgctggctgttcttttcatggatcacgcaaaatgtcaattgtgcattgtataatgttaattaccaatacacatacctactattagttgatattaagtaaggcaggctttcttgaacaatatgtaatgtaaatttgtttcctgttaatgttatgctttagattaatttaactaatgctagttattagatagaaaaacctactaagcctattaccccattcattcacaccaacaacacaactatcaaaagggcggacgcacaaccagatccatgcttacatg

SEQ ID NO: 4647 - DNA, 235 bp, Bos taurus
  Clone ID: 13-LIB34-051-Q1-E1-D1
atttatctattacagtaaataccaggtttatgtttttgctcagaagggcagtttgaaccacaactactatgtaacacaggtcctagctctctttcattctgagacagtgaattatcattacaaaagccactgttctctggaaagcaaagcttgggcctctgatggtatttcagtctatatgtatcagtcatgcagttatcaaccgaaaaataggtagttaatgaaactgtctcat

SEQ ID NO: 4648 - DNA, 355 bp, Bos taurus
  Clone ID: 13-LIB34-055-Q1-E1-D1
agggtagatggttgcaccaccttgttcttcattcgctgcaggaagagaagttaaatgtctagagaaacctaatggacaatttccacaacagatgataacaaaaagtaatccagatggggtgcaggtgctgtaaaatgatacaaagctatctcttcgatccagttcacgtgccctcccctggttacgttaacgaagtaaacagctgcaagttagatgaagaggacactcttaaattgaaagacaaacagagcagcgaaatcctggtgcacaagggtgaccctccgaatgagggctccaagaggactgcaagcgggagcggaacagccgctccgcaggagccctacgggccgccccg

SEQ ID NO: 4649 - DNA, 223 bp, Bos taurus
  Clone ID: 13-LIB34-057-Q1-E1-D1
acctgaagtcagttagaaagagctcaactaaatgacattcatcaatttcctttgtcattcatttatcgtactagacataaaaaatgaacttaatatgagagaattaagaaagaattgatcccatatgagaatgtttgatttgaatgggatcgcttggaggcatgagaattttcgaatcttgacgttttttttaaccaaggctagacagacaggccttatggag

SEQ ID NO: 4650 - DNA, 238 bp, Bos taurus
  Clone ID: 13-LIB34-060-Q1-E1-D1
aggacgcgtgggcggacgcgtgggtacggatagaatctttctagaggaatggaaatttgttcacttataattttactgaaggcctcaaattgttccttatcaactgaccattaagaacaaagagttccctggcaaatagacctttcagaactcaactacatgaaatgccaaaaggcgcaaaagatattcaacagacaggagaataatgcttgctggattcagatgtatctgtaggaaa

SEQ ID NO: 4651 - DNA, 376 bp, Bos taurus
  Clone ID: 13-LIB34-061-Q1-E1-D1
agcggaaccaggtgtcgtatgtgcggccagccgagccggccttcctggcccgcttcaaggaacgggtcggctacaaggaagggcccaccgtagaaaccaagagaatccagcctcagctcccagaagaagatggtgatcacagtgacaaagaagatgaacagccccaagtggtggttttaaaaaagggagatctgtcagctgaagaagtcatgaaaattaaggcagaaataaaggctgccagagcagatgaagagccaccttcagctgatggaagaattatgtatcgaaaaccagtcaagcgttcctcagatgaaaaacattcaggtttatcagcaagctcaaaaaagaaaaagacaaaagaagaagattgaattaa

SEQ ID NO: 4652 - DNA, 218 bp, Bos taurus
  unsure (196): Clone ID: 13-LIB34-069-Q1-E1-D1
tacttgtcgggctgtctctagctgcggcaagcgagggccgccctttgttgctgcacgtgggcttcctactgctgtggcttgtcatgttgtggggcacaaactctaggtgcccagcctcagtggtcatcacacacaggcttagctgatccatggtaggtgggatcttctcagacaagggattcgaagccatgtcccnctgccttggcagggtggatttt

SEQ ID NO: 4653 - DNA, 71 bp, Bos taurus
  Clone ID: 13-LIB34-070-Q1-E1-D1
actggatcgatgcgtcacactgaaggaacactgtgtcctcagtgaccaatgtgatgtccatcatgccgcca

SEQ ID NO: 4654 - DNA, 388 bp, Bos taurus
  Clone ID: 13-LIB34-072-Q1-E1-D9
gggccgagccacgcgtcaaagagagggtgtgatttatttaaagttttactgcttctttatatctgtgtgttttaatttgcatctgctaaacataatgcatcctttccctctgccattcttgtgttgatttgagatttttgctgtatgtaattagaaaaaaatgtaaaacatgatttatgtgaaatattgtatagtaaaagttggtctaatagtagaactttacaattttttcttattgtgaggaatctgttaaaagtttaaggctttgctgaaaacttaattcattctcaggaatttcataaatattctccccaggtaaataattgaaatagttgtaaaataagtagatagctgctgttaatataatacagtacatttaagggggcat

SEQ ID NO: 4655 - DNA, 197 bp, Bos taurus
  Clone ID: 13-LIB34-079-Q1-E1-D1
aaagagacaaaagggggagggacagagttccgtcccgggaagggagtcttaaaaagagagaagtttccaaacaccaggaaaccttctcactgccaaatccgtgccgagctttggaaccacaaagggtaccatacaaggaagaaaaattaattaaccatttaaactccccaaattccaaccccaacggtaactccccc

SEQ ID NO: 4656 - DNA, 220 bp, Bos taurus
  Clone ID: 13-LIB34-081-Q1-E1-D1
ataaacagaagtgctgctaaccctcatgatggattgattagctgactgtggactcggcaggattcagatcagtcatcgtatctgaacggaggtctgatgcaatgtttcctcaggattcatccttctataatagtcgagctcttacatctagacatgtgtacaggttactggatacacttgaatgtataggatttagctggccaagtagattcacagcttt

SEQ ID NO: 4657 - DNA, 453 bp, Bos taurus
  unsure (211),(287): unsure at all n locations; Clone ID: 13-LIB34-081-Q1-E1-D9
attcaagggccgacccacgcgtcagtgatgtgaaaaccgaaaatacttgcagaatactaatattctttccttggtgtactcatcagcataatattatctttgaagaggaaagacaacccattaacccattatataggttcctcttttgtcccaagtgatttaaaaaggttaacctaaaagaactggctttttgacattacaaggacattanaaattgtaggtaattaattacaagttgattcagaatctcgtggtcaataggattcagcttactaaggacaatatanagaaagtacatgatgcggaattatttctcaactgtgacagattgctacagaattcagcaggcagatctctctcctgtgtattgattgctctttcaagctagtgtgaacagattcctagggctatctcttcatcccgaaggggggaaatactctgatgaacaatgtg

SEQ ID NO: 4658 - DNA, 376 bp, Bos taurus
  Clone ID: 13-LIB34-083-Q1-E1-D1
agcagcaccagcctctcccgagagatagtctgcgaagtctttcgctccttgcataacctggctggacaacttaacctcagagacgatgtggtgaaaattacaatcgattggaacaagctccagagcctctcggcactccagcccgcttttctctttagtgcacttgagcaacacgttttatatttacagccttttttagcaaaacttcagcctctgattaaagaggagaatacaactgttgctgaagaaataggaaaaacagaaacagggaacaagaatgaagtaaatgccaactttcccattggagacctggaagaggaagaaaagcacaaagacagtgatttaggagatgtgaaaaagacacaggtccattttg

SEQ ID NO: 4659 - DNA, 136 bp, Bos taurus
  Clone ID: 13-LIB34-084-Q1-E1-D9
agtgcagagaacagaaatgatgacattgcacctgcgcaggacagagactcagcgtgtgacgagtattcagaaaatcttggagaaagagcgttaaacggcatggtcgagtaactcgcctgacaccagaagatttccc

SEQ ID NO: 4660 - DNA, 317 bp, Bos taurus
  Clone ID: 14-LIB34-004-Q1-E1-D9
gatgatttccgagtggcagctttgagcagatcagccatccagtgcactgcgttattaccctaagattatgcagccgagcctgacgggcctgatgtgactggcatgagaagaggacgttacgattgtctgatagctgctgataaagcattcctgatgcggattgtacgctgcaagctacttgaatctggacctatcatggccgttactgaaaacttagtttggctggccatgagcatgaccaacaataattgcaaatttacatacaagaagcatcttaggacatctgtgatgaagtcacgtcagattccagagacctt

SEQ ID NO: 4661 - DNA, 408 bp, Bos taurus
  Clone ID: 14-LIB34-006-Q1-E1-D5
gaaaaagttcaagttcaagtttccaaagaagcagcttgcggctctcacgcaagccattcgcacaggcacgaagactgggaagaagacattacaggtggtggtctacgaagaggaggaagaggatggcacgctgaaacagcacaaggaagccaagcgattcgagatcagtaggtctccatccgaagacacccctaaaagcctgttcaggagactagagcagcccagtccggagagtagtgctccggtttcgagaactgatgaaatcagaaaaaatacctacaggacgttggacagcctgcagcagaccatcaaacagctggaaaacaccatcagtgagatgagccccaaagccctagttgaggccgcgtgttcttcccacagagattctgtttcaagttcatcccagac

SEQ ID NO: 4662 - DNA, 374 bp, Bos taurus
  Clone ID: 14-LIB34-009-Q1-E1-D5
ggagtggagccacaaagggcttcctctgcggcaacatctccggcgacgctacgtgcccgccggctctgacccagcccgccgcgcgcgccagtctcgtcccgtcctctcactacctggcgcgcacctggcccaggccggggtcccgccgagagtcgggaaggcgcgtgccaggggccctagggaacctcagagcgcgcatatcatggggcagctgccaggggccggggtcttctgccgcggtggttgtggcttttcccgattgctggcctggggcttcctgctggttctgagtccgcaaacctccggctccagtggagccggagccgtgtgggacgcgtagctcaacgtggtcctggcgggttccgcacaccgga

SEQ ID NO: 4663 - DNA, 413 bp, Bos taurus
  Clone ID: 14-LIB34-012-Q1-E1-D5
aaaagctttcctgccatttctgttttaagttaacctccagttataaagaatgcaaaccaagtgacgggttcagttcctaaggacagggaagtctagagaccaaagtacagtttctgtggaatggcttgaaactctgttccatttctgttaccaaagtcttcactgcgtgagcaaagacatacccctccggaaaatgagtcttcagacaagaaatccttcctcccggcagacatgggaacgctttgtgtgctttctgagatgttctatagaaccaaccagctgctagaaaataaagagcagatgagacttcaagctgcttcaaaaacaagaccaggcaagaatatatgaacagcatctaacacatacatacatatacaaaagaagagagaagctcacatgtggctttgtttttg

SEQ ID NO: 4664 - DNA, 403 bp, Bos taurus
  Clone ID: 14-LIB34-016-Q1-E1-D5
gaaaggctgacagtctcatcatcttcctctatttaacattttgaaggacgctgctgaatgaaaacattacaaaatcacaagcccgctcttctagccctgaggtaatgcctccaagttgggtttttttgtactttattcctctcctgaatccataaatctttcaaaagtttccaaatgggtaaacagtatgtctgttacgaaatgaattgtaagcacacaccatgtgtaattcaggagctcacttgtttttgtatctgaaaagcaatttgagtacattttatagattgctttttataaacactcataaaaaattaacctttgaaagaaactttcttgaaaattttaggattctctgaaggtatgggatggatgaaattttaagagttagggataatttatttta

SEQ ID NO: 4665 - DNA, 248 bp, Bos taurus
  Clone ID: 14-LIB34-019-Q1-E1-D5
ggcgcggtgggcgccggggctgtggcggccggcggtgcgcacggccgcttggcttcggggcacgcgtttcgcgagcggcggcacgcagagtccacccacttttgggttgctgttggacattgatggggtactggtgaggggccaccacgtcatcgccgccgcgcaggaagccttccgccggctgctggacccccacgggcagctgcgggtgcctgtggtcttcgtcacaaatgctgggaacatctcac

SEQ ID NO: 4666 - DNA, 423 bp, Bos taurus
  Clone ID: 14-LIB34-020-Q1-E2-D5
gcggggccagttgaccgtcacggggagagcgtctgtacgccgagcgagtggaagatgaatgccagaggacttggatctcagctaaaggacagtattccagttactgagctgtcagcaagtggaccttttgaaagtcatgatcttcttcgaaaaggtttctcttgtgtgaaaaatgaacttctgcccagtcatcctcttgaattatcagaaaaaaatttccagctcaaccaagacaagatgaacttctccacactgagaaacatccagggtctttttgcaccactaaaactgcagatggaattcaaggcagtgcagcaggttcagcgtcttccatttcttccaagctcaaacctttcactggatattttgaggggtaacgatgagactattggatttgaagatattcttaatgacccatcacaa

SEQ ID NO: 4667 - DNA, 399 bp, Bos taurus
  Clone ID: 14-LIB34-021-Q1-E1-D5
cacctgtgtcaccacagaagaaatttgcgagacagacggagatttgcccctgcccccctagaacctgcacctctggatgactgggcttctatgcgaagcacttctggatttcttaggcaacctcagaccctcctttttagctgttaggcttctgtgatttcctttaggtttgttcttagagaataccaagtgtgtagcagtgtgtgtttgcagtgacctcggcgtagttcaccttctctttgctgagcatctgcctccttctcttgagaatctgcccaggagccccgggagtggttcagccaagggccctgccaagcgcacactggctcctgcagttccatcttcctggcagccttcgctcccctaatgggtagcagctacccagcaccttgactcctg

SEQ ID NO: 4668 - DNA, 177 bp, Bos taurus
  Clone ID: 14-LIB34-022-Q1-E1-D9
agatcgagatctcgaacggccgcccttttttttttttttttgtaacataaaccggtttaatgaataaatctttttgagttttctgtgatagatcttacataaataaagagagggtcaaagtggattttacccacatgattttgggtcacctcaaggtctcttgctaagttgaaactt

SEQ ID NO: 4669 - DNA, 412 bp, Bos taurus
  unsure (386): Clone ID: 14-LIB34-026-Q1-E1-D5
gcttgcatagcctggctttagaggagcctacagtcatcaagaagtacctgttgaaggtggctgagctgtttgaaaaacttaggaaagtggagagtcgagtctcctcagatgaagacttaaagctgacggagctcctgcgatactacatgctcaacatagaggctgccaaggatctcttataccgacgcaccaaagccctcatcgactatgagaattcaaataaagcgttggataaggcccggttaaagagcagagatgtcaagctggccgaggcgcaccagcaggaatgctgccagaagtttgaacaactctctgaatctgcaaaagatgagctgatcaatttcaaacggaagagagtggcagcgttcaggaagaatctaattganatgtctgaactggaaataaagcatgc

SEQ ID NO: 4670 - DNA, 80 bp, Bos taurus
  Clone ID: 14-LIB34-034-Q1-E1-D9
aatttcttcaaagcgtgatggcagtcgggattataagacaatccggaaaagatattcagaagggggtatcgatccgtctc

SEQ ID NO: 4671 - DNA, 401 bp, Bos taurus
  Clone ID: 14-LIB34-036-Q1-E1-D5
ccaaggtgaatgctctccgcgtttggggtgtccaaatgtgagttttgcaaataaccttatgtagtcctctctaaagccgccatatttaaaatctattttcactctatttgtgcttaaactttactcttgcaaattaacaattttatcagtgatttttgaaaagttaaaatataagactaacgtttcaagtgaatgcatctatagttaagatgctttatattagactgtcacgtcttggtgtatatctgtatatactatttgatattcagagaatctaaagagcttgtctactgtgttcatgagactgagcagcttttgacagtggcttcaatttgtaaactgcttgaagaccatccgggcatcagcctggctggttggctgggcccagtggagcctgccag

SEQ ID NO: 4672 - DNA, 349 bp, Bos taurus
  Clone ID: 14-LIB34-039-Q1-E1-D5
aaggacctcaggatgagaagagggtcgtagacagggcctgtctcccctccaggggtgaccccgtgcagaagcactggcccgtcctcaggcatcttggaccggagtccaacagaaggtcagcaacttactattaaaacagttgtttcagatcatattgatctctttcccttttccttttgtccttccactgtatgacttgaatcagttttgattctatttgtaagtttttctcgtcgttaggaacctgccacttccgttgcgttctctcgggcagtgtaggggttcagcctcctggtttttcaacctcctgcaggcactgtggggctctgagggccagcgggtccgtgtc

SEQ ID NO: 4673 - DNA, 76 bp, Bos taurus
  Clone ID: 14-LIB34-044-Q1-E1-D5
cgcacgcctctacagtgagtcgtgttattgttttttttcttttttttttgtctgttttttgtgattttcttttttt

SEQ ID NO: 4674 - DNA, 301 bp, Bos taurus
  Clone ID: 14-LIB34-048-Q1-E1-D5
gagaacatcatggcaagcgtggctgcatttctgacctgggctctggccctcctctcactgctttcacccacggaggcacggagaggcttctgggactacttcagccagagcatcggagacaaatgcaaagtggagcagcagcaaaagctggcaacggagcccacgagcctgagagaaagacttgagccacacctcagcgatatggacaagttcctgataaagctgggccctctgaacgggcaggggatggagattcccaggctcacacgcgactcggtgggcatgtggcatcagctgcatg

SEQ ID NO: 4675 - DNA, 233 bp, Bos taurus
  Clone ID: 14-LIB34-052-Q1-E1-D5
ggattcctgcaagtagccagtcctttacaaactttgcgtgtcttttttaaagtgaaataattaaggatgtagtcagagtagagagtgatttttctaaatctcagcctcttcttcactctgaagcattaaaaaacaaacaaaaagcctgtaaatgtatgatggctgaatgtgaaactgttttgagtcactgcagccagttttctctaagaactctgcttgtgactttacctttt

SEQ ID NO: 4676 - DNA, 341 bp, Bos taurus
  Clone ID: 14-LIB34-056-Q1-E1-D9
ggggacccgccgcacagcacactctcgccgcccgcgcggaaggtctctctctccccgactcctggcaccgcatccccgcaccggcgtggatcgggacccgcgctctccagtgcagccagggctcccgagcgtgcgtgcggctggagacgccgagctgctcacgatgaggaggggagcgaggctccggcagagcggcctcgtcccgcgggtctgagcgcccacccccgccgccgggactccggcctctctgggcttcggcaatgagcgccctgtgaccggcggcgccgcgagtcgtagacccgggactccgggaggcaatgctggctcggcttggagtggct

SEQ ID NO: 4677 - DNA, 206 bp, Bos taurus
  unsure (14),(21),(29),(43): unsure at all n locations; Clone ID: 14-LIB34-062-Q1-E1-D5
tcccgggtcgcacncacgtcnggtggttnagaacatgtccttnaactctctgtgcctgtctccttgacttatttgtcaagggcagatacagatgttatctggaactttgcagggttatttaaagattaaatgaaatgatgtgtgtgaggggtctgtcacagtaaactcaatgaatcttagttaatgctattattctaatatgaagg

SEQ ID NO: 4678 - DNA, 223 bp, Bos taurus
  Clone ID: 14-LIB34-066-Q1-E1-D5
gagggctcacagaccaattgagacatgaatcctgcctggtctgagtatcatccacactgctccctacatgtccagttcacttcaacgactgaatgacctcttaatttctacaacgttccatatgacacctacaactgaacttgtgcatctgcaggttcatgcccaacgatcccaagctactagatgtctacaggccatatgacggtgatttttaacacacaga

SEQ ID NO: 4679 - DNA, 233 bp, Bos taurus
  Clone ID: 14-LIB34-067-Q1-E1-D5
catgatccaaaaagttgaggtatccatagtaagtggttttaagaagcaggaacagtgacaatggatacctcaactttttggataaatcaactttttgttgtttgtgccaagtgttacatttcagggtttgcttcagtaatcactaattagtgcttcagtcattaacttagatgccagcaggttttgctttgtttttaagaaaactatttcaaaagttatattaggcccagaaa

SEQ ID NO: 4680 - DNA, 223 bp, Bos taurus
  Clone ID: 14-LIB34-068-Q1-E1-D5
gcgggtaaatgcaagcctctgtatgtgagtcgcatcatactattctctttagttttgaaaatttccataagatgatacgtttttaaaaatgagagttttagactggtactgtgttagacaacattcacgaatttccattgtcaatgaatacttccaggcagaaaaaatataatttcctgatggaccattaactggtacactaacttagatcttacaatagtta

SEQ ID NO: 4681 - DNA, 195 bp, Bos taurus
  Clone ID: 14-LIB34-070-Q1-E1-D5
gcgcagccagtggccaagtatctgaaaactctgggctcctttttggtgggctcttcagtgggaagagcataaatcctctgaccaatgcccagtcgcgccaccggctattttcactgaacttttgaaacttaagagtgctctctggcatgagttggaaaatttcattccttggtgggtcttactgtgcggggaccc

SEQ ID NO: 4682 - DNA, 403 bp, Bos taurus
  Clone ID: 14-LIB34-079-Q1-E1-D9
ccggccagtctccccagggaagctccactcggggccaggctgccatggacgccctggtccgactcctgcagctgctggtgtttctcctgaccctccccctgcacctcatggctctactgggtttctgggagcccctgtgcaagacctatttcccctacctaatggctgtgctgacggtcaagaacaaccgagtgatggagagcaagaaacgggaactcttcagccagataaatgggctggcaggtacctcagggaaggtggccctgctggagctgggctgcggcaccggtgccaacttccgcttctacccagctggctgtaagattacctgcctggaccccaatcctcacttcgagaagttcctgacaaagagcatggccgagaacaggcatctcgagtatga

SEQ ID NO: 4683 - DNA, 398 bp, Bos taurus
  unsure (213),(256),(373): unsure at all n locations; Clone ID: 14-LIB34-082-Q1-E1-D9
cctgcattgcaggcaaattctttaccatctgagccaccagaaaaggtactgtaagacttcagccaagtcccaggcctgctctccagagccacttcacagcactcaggggaatgctggctcctggccctaggctgttgcctgggaccaggcggatggggtcctccaggggttgcaggtcagagggaacccccaccaaaaggtgcaggctaatangaaggtgccctttattgaccgtgtcacctgaggagctcgctcnctccagtgcccacttctcagactctggagtgtgacaacccacttggattcctgattgcaataaaatgtgagttcaatttgaagcagattaacttccttttttgtagtcaagtctcanaatgaactcccttatctgcgtcctc

SEQ ID NO: 4684 - DNA, 197 bp, Bos taurus
  unsure (10): Clone ID: 14-LIB34-084-Q1-E1-D5
aagatcacanggcattggcgcatggatatgggtgactcatacttcacgtctggggcacttcagggctgattaatccagcggtgagtcgtgtcaacagtcacggaaagatataattcctcatcggtagtcagatttgggacattcaagaattgagtcgtgtagcatgaattccccttatcacatctaccgccagcatc

SEQ ID NO: 4685 - DNA, 304 bp, Bos taurus
  Clone ID: 15-LIB34-001-Q1-E1-D11
agctagttctagaatcgcgagcggccgcccgcgatctagaactaaacaaagtatagaaatttttctttaatagaagacattcttttgctatctcacaggaggttggttgggtcggctgtagccccgggttgtggttgaaatgaattactgcctagctgagccaaaacctttgctcgtacctgttggatcactacaacaaatcgctgcttatgatgcattgcgtatttccgtagtactgttttgcattttccatacagacacaaaactttgcaagtcaatcactgttgttctcatggtactgttt

SEQ ID NO: 4686 - DNA, 354 bp, Bos taurus
  Clone ID: 15-LIB34-009-Q1-E1-D11
gttaagaagtcgttgaaccgaacctacacacaggccttctcgtggttaggcaccttcctctctcctcaggcctgtaccttcctttcagctgtggccaccattttgttggcactctgttccattttaacagttgctcttatttttccagtttgtggaatataactccttcacttcagcaaaatgttgtcatggaaacggtgttgacatccgtgtccggagacttgatcagtcttggtgctatcaattacactgtgagtttgggcaatgcacaagttgccctcacatttattgcttcatgtcaaaagagatgattgtgttgcatgacctgcgtacctcacaaggctattgtcggga

SEQ ID NO: 4687 - DNA, 416 bp, Bos taurus
  Clone ID: 15-LIB34-009-Q1-E1-D3
aaaatttatttcctgtctagccttcctattacacaagcttaaactgacacaaatctcttaacaaagaacaatgctgcagcgaagggagagatagttgtcttttacttaaacatgaaagaatcagccttttagcaacctggggaaatggtactttccaaggaatggtgactgatccaggcatgttatcaaacttcccagtcatttccacctttcctatattgcctttggcttcttaagatttggggagtttaagaaatgctacttcaagtcttgctctgctcacctacaggtttgaaatcagacattctttatgtctggtgaccaagagagaataccttcatttattctatctccccctgagcgaattgaggtaagaaacctctgagcatacaagacatcccttaccactatttttt

SEQ ID NO: 4688 - DNA, 401 bp, Bos taurus
  Clone ID: 15-LIB34-015-Q1-E1-D11
catcaccgctcccccactcccacacctaggaagatgcaatgcctgtggctgaagcagcagttttgcaaacctgagaacaaaagacatgtattgctaagcagactgaaggagtaggaaacagatcaggtaatgtccttgcacagacacaccagacttacagatgagaataacaatccctgatttgagtaagccaatgcagactggtttctgttaagtgtaaccaaatgcagccctgataaacctgttcttttcctttacagacttgctctcccctagagacttcacctaccatccactctccttactcttccccctttcctttccatcatctcttaaacttctatactgtgctaagagataatctctaaccttaacggtcccactctagttcacacacagac

SEQ ID NO: 4689 - DNA, 285 bp, Bos taurus
  Clone ID: 15-LIB34-016-Q1-E1-D3
gggaattctctggagaaaagatcagtaggcagagctctggggaatagagctcaaaggcaaagaaaatgctagttaatagtacactgttaatgttaaattgttacttgaaaagtttctaccatgcttaaaactgccaagtgtggggaacgatacaagcaaagttgttttgctttgctacaagaaggggaagactgaaaagttaactgacacctggatatcagtctcttgaaagattgttacggactttcatcatcagatgaacatctttcactccattgcaagctt

SEQ ID NO: 4690 - DNA, 199 bp, Bos taurus
  Clone ID: 15-LIB34-021-Q1-E1-D11
tccacgcttcgcaagaaggttggcagcagctgcgctttcataccatcacagcgtcaggactaacaggtacttgctgcataaaccgtagtaaaagttccaacaccaaactagcgtaaaagctttttactcttggccctaatgctcatcgggtatagattcttgtagacgacgatctccctctcactctcatgcaacagat

SEQ ID NO: 4691 - DNA, 218 bp, Bos taurus
  Clone ID: 15-LIB34-021-Q1-E1-D3
gtcagattctatagtatagaagctcctgttgcatataaaattttgtatggttacataaatgaataaatctatgtcatttagtttgccaggtatgaggatgtgcattcacatttataataagtagttaatctaaaatgtgagacttaatagtattgagtactgccttgctagagttaattgtatacaggttctaggaaaaataaaagatgctggaggct

SEQ ID NO: 4692 - DNA, 243 bp, Bos taurus
  Clone ID: 15-LIB34-024-Q1-E1-D3
tcatgggtcgacgcaagcgtctagcatgcctcatattttctaggaatccaaaccacaatggcagcccagtacctcagagaacccaggaccagccacgggcttgcaaactctggagattcccagctgagacttgtcttagtgggtaagactggggcaggaaaaagcgcaacaggaaacagcatcctcagagagaaagtgtttccgtctagcttttccgctgtatccatcaacaagcactgcaag

SEQ ID NO: 4693 - DNA, 113 bp, Bos taurus
  Clone ID: 15-LIB34-025-Q1-E1-D11
ctatgttccagatcacgagcggccgcccttttttttttttttttttttttttttttttttttttttttttttttatgtttgtggtgggatgcctgatgtaaggatgggtaggg

SEQ ID NO: 4694 - DNA, 408 bp, Bos taurus
  Clone ID: 15-LIB34-031-Q1-E1-D11
catgaatatttttccacagtttgtcctgatctacattgtcaaagactttggcataatagtgacaccacattaaaaacaaaagaatgagcagggtatggtctctacttctgggtatttttaaaaattgaggatccattagaacattgatgacaaccagaaaataaatatgagttaactgactaacatgagcataagcaaaggagggtatagtttgttgccttggtgtttgaattgtctgagatatatgtgaggttggttggacttggatattttactcagcttcctcagtaaagcctgaaggagatgtaaggccccctctggactgcatggcttcactccagtgaatcttttacatatgtacagtttgtgccttcatatccatgttcaagtaatacttactaaacattc

SEQ ID NO: 4695 - DNA, 103 bp, Bos taurus
  Clone ID: 15-LIB34-043-Q1-E1-D11
acaaagtaagcaataatgacatgtttatttaaaatttccagtagagaaaacccactagttttggaataaaagtactcaatgtatgataacgtaagtgaatatt

SEQ ID NO: 4696 - DNA, 357 bp, Bos taurus
  Clone ID: 15-LIB34-044-Q1-E1-D3
gggccgacccacgcgtccatgtacacctaggagatacgcccaccatctactttgagaaatgctctgtacgtaagttcacagtcactactcactgaagtatcacatgggaagaatgaaatgacatttctcgtcaattatctttttgagatttttgagtatagaaaggattaaatggatgacacagaattgacaaaactttatttcctaactttgaaattaaaactacagtctcctaacacactagcctaatttctgatccttagcaccatgacgttaactgttgatggaaacaaagattcctccattggactgtggcatgaacccaaattcaatgtgtcaaactctaatcagtagatg

SEQ ID NO: 4697 - DNA, 322 bp, Bos taurus
  Clone ID: 15-LIB34-049-Q1-E1-D3
aattaaagatcagagaaagagaactctttcctaaaaaaaagaatcaaaattttggaagaaaagcttaaaagaaccccaaaagatgaaaaaacaagctctgttggaagggaacaaattaataaagcctaacacgcctaacgagaagtctgcatccatagagataatctgaaaagcaagctggattaaatgaataaagaccactctgaatctttgaaagtgttcaatgatcagctacaatctaaagaagtagaactcctccagctgacgacagaagttgaaactcaacaagttaatagaaatttaaatcctccatcatcaaact

SEQ ID NO: 4698 - DNA, 179 bp, Bos taurus
  Clone ID: 15-LIB34-051-Q1-E1-D11
gttctagatcgcgagcggccgccctttttttttttttttttttttttaagctttaaacttttttattgaatttaaacatccacatttttgccagtcctgtgctacatttctgcttagaacgtatgtccatgggcaagggtggtgcagtaggcacgggaggtccgattcggccgcaggtt

SEQ ID NO: 4699 - DNA, 233 bp, Bos taurus
  Clone ID: 15-LIB34-051-Q1-E1-D3
tcgggcccgagttggaggctaactgagaagtcttcgttcctcagatttgttgatctacagaatgcttcgatacccatatttttgtagaatccataaaaattttctttcatgctggttggaatctggcatatataatttgggtgtctggccaaaaaaaatacatgctacagcagaaagatataatgaatatgaagcccaggaggaaacagatcaaactggaattcaggagttac

SEQ ID NO: 4700 - DNA, 242 bp, Bos taurus
  Clone ID: 15-LIB34-052-Q1-E1-D3
gcacctgctcaagagctaccggagctgagccctttctggagggctgaccgtgccggccgaggagccgagctggccggaggaccctgggaaagggggagggagtcacgtggccttcccactgactcccccgctgcagcctgcggggcggggccacgccccctcttgccaggacccctcccacctcccaggcccaggctcctgggtgggcctgctgccctccgttacctctctccaccccagac

SEQ ID NO: 4701 - DNA, 242 bp, Bos taurus
  Clone ID: 15-LIB34-054-Q1-E1-D3
catctttgaaggttagaaacgtgaaggttcgtgtgtaggggacttactgtgtttgtatgataacttgtgctttgttaagtagaaacgtaggtttgaaaaaaaatcataatgtattatcagctcagtaacctgattaatagcaggttattattgtctttccaaacatagaaaacttactctggtgacatcgtcaactgttacattttactgatgaacagatacattggaattttagaaaactt

SEQ ID NO: 4702 - DNA, 133 bp, Bos taurus
  Clone ID: 15-LIB34-058-Q1-E1-D3
ggcgatacctgcagtcggtggctgccgcgggccgggagccggtggcgcttctgtgcgcgcaggagccgagcctgtgagtcactggcgggggtgaggaattagagccatgcggagtcgcagcgggctgctgggg

SEQ ID NO: 4703 - DNA, 203 bp, Bos taurus
  Clone ID: 15-LIB34-059-Q1-E1-D3
cgaccgttttacgttaagtggtttgtagctttcagcctggtgactgcggagactgctggggcacatcgttcccctgtcctctcggttccctgcggccgaaaggcctgctaggattcggggatctggcctaggcttccgcggcgccccgcgggggcggaatggccgcggaagaagaggacgaggtggaatgggtggtggagagc

SEQ ID NO: 4704 - DNA, 107 bp, Bos taurus
  Clone ID: 15-LIB34-062-Q1-E1-D3
gaagagccaaagcgaaccatgatggatgtaaccggacaggctgataggatgaccggctgaccgatgggacgaacccgcgcccaccgatgggactgaaccgcgcccac

SEQ ID NO: 4705 - DNA, 380 bp, Bos taurus
  Clone ID: 15-LIB34-063-Q1-E1-D3
attgctacacaaattcagatgctaactgttcataagggctattattgctgccccaaaagggctcattaaaatttgagatttggtgttaattcactttttaagataacatgaggggaaggggacagatggttaaaactagtttctaaattataagtcaagttcttatatataaacaagagtagtaagtttgccacatttattttcagagaatggctggttgggtctctgactaaatcagggctgagtttctacacctaataagtgttaaataaggtaaatagcctttttaataattttctttacaacatggtttttaatgacgcagatttcctaagatagtgaaacattttcttttttaaaagcaagacattgttcttttc

SEQ ID NO: 4706 - DNA, 427 bp, Bos taurus
  Clone ID: 15-LIB34-075-Q1-E1-D3
tctctaaaatgaatcgtatgtaggaaattctaatccaagaactgtgtgttgagctgttccttttgagccagcatcacctgtcagttagcacctggtataaaagcctcagtgtccccagcagtgtgatgagggttatttttatagcattccactttcctaatgtcaggtgtgaaatcagattttcatgatcttaaccaatgttttacccttgtagtcaaggatgaagggataagagatggtcttcatgtggaaggatatcttctttaatgaaaaattagaggtatttttctcagaactgaaaattgtgatgttgaggcttatttgcagaggactgaactaaattcagtggattcttgcttttaatgtgagagcatggaaagtgtggattacacattcctggggtgagagtatttttctttagttggat

SEQ ID NO: 4707 - DNA, 148 bp, Bos taurus
  unsure (88): Clone ID: 15-LIB34-076-Q1-E1-D3
cccacgcgtccgctaaatctagatagcgagcggtcgccctttttttttttttttctttttctttctttctttattcgaacgacactgngaaaagggacatcccctgccgagacggttccggttcattagtgggggccaaaggggtgtc

SEQ ID NO: 4708 - DNA, 395 bp, Bos taurus
  Clone ID: 15-LIB34-081-Q1-E1-D3
atggtgagctacaaagctcggcgccgagcagctgatttccctttcccggagccggtggcggggcttggcgtctcgctcctctcttttccccgttcacccggccttccgaggggcacctgcgcaggagtctgaaaaatccttttgcagagttctaggatggagactgaagggtatccagagatgcaaagagatgtagaagtccagaatgatgaaataaggtcaccaccaaatgagaggatggctgaggagccagaaggcatcctgatagcaccgccccaggtccaggttccgccagagagcctggatgaagactctgaagatgacctggagaccatgccccgaaggagtcctctcaaccctgcagcctccaggcagaggttccggcagttccgcta

SEQ ID NO: 4709 - DNA, 293 bp, Bos taurus
  unsure (176),(182),(197): unsure at all n locations; Clone ID: 15-LIB34-084-Q1-E1-D11
agcaggtgtcggagccgaggctcccgggcgcggcctgcttcggccccatggtgggctttggggcgaaccggcgggccggccgcctgccctccctggttctggcggtcctgctggtggtgatcgcggtgctcgccttcaattactggagcatctcctcacgccacgtcctgctgcangaggangtggcggagctgcanggccaagtccagcgcaccgaggtggcccgcgggcgcctggagaagcgcaattcggacctcctgctcttggtggactcgcacaagaaacagattgac

SEQ ID NO: 4710 - DNA, 239 bp, Bos taurus
  Clone ID: 15-LIB34-086-Q1-E1-D3
acgcggccgaataagtgtacttaataagatatgacaaggttatttgtcttcacagaccatgagccatatcagttatgtattaatctcattggacacgtactgaggctcgctccctgatgagttctcattgcactttggtcaaagatttagccaacttttcacaggtaggaatgtgctcgcaggttcattttatgaagcacttagtgatcgaatgctgtacaatcgctgttcgttgtttg

SEQ ID NO: 4711 - DNA, 388 bp, Bos taurus
  Clone ID: 16-LIB34-010-Q1-E2-D7
gagaacatcatggcaagcgtggctgcatttctgacctgtgctctggccctcctctcactgctttcacccacggaggcacggagaggcttctgggactacttcagccagagcagcggggacaaaggcaaggtggagcagcagcagaagctggcaagggagcccacgagcctgaaagaaagacttgagccagacctcagcgatatggacaagttcctggaaaagctgggccctctgaacgggcaggggagggagattcccaggctcccacgcgacccggtgggcatgtggcagcagctgcaggaggagctggacgatgtgccggcgcgtctggagccctacatggcgggaggtgaacgagcgcgtgggctggaacctggaggggctgccg

SEQ ID NO: 4712 - DNA, 341 bp, Bos taurus
  Clone ID: 16-LIB34-012-Q1-E1-D7
tagttatttttggattctgcagacgagggggttatctgaccgatccggttcacgataccagttgcttacagggcccgcgcaacaactaagcgggtcagaatcagccaagcctaacttgtccctatacgtcgctctaggcaacaggcagaaataccaagcgacggcctcttcctcttctcatcactgtgtttccgcttggagcgtccgcctccggtcacgcgcagagtttcttctgacattaggggctccgcactacaacgagaatggctgtggtgtcgctgatctcgtaccggagcatgtgcaatgctgtctgatcgtccatgctgtctgtcgcaacctgg

SEQ ID NO: 4713 - DNA, 416 bp, Bos taurus
  unsure (371): Clone ID: 16-LIB34-014-Q1-E1-D7
aagggaaatcccactgaagaagtctgcgtgccccacagccagcagttgggccaaaggcacgtgctggccaaagaatgcttgtcacccaaggctccctctgggtaggggaggaaagaggtgtccccaaaacaggaattgagtcttttcctgtcttcccagacacttggttgggatagatgtcatatcccagtggtccatgaggccatcggttttgaccctgaggtcccttgtcacttgccagctggaggactggctgggtccactggccagccaagggttcttggcagggggccgtggccttttctgcctgcgccctgagttgctgacctttgatgatgggccactggctgcacttgtaggggagtgcctgngaagctgttccttttggccgactacttcctggtgcctcgccccac

SEQ ID NO: 4714 - DNA, 241 bp, Bos taurus
  Clone ID: 16-LIB34-021-Q1-E1-D7
gggtccacgcacgcgtccgcatttacttcaatttgagcacaaggtttcaattcctgttggtagagtattccttataaataaccaaaatactgttaaatcatttggctttaatgtataaatatctttgggatgggttcatggtgtttatttcttccaatattgaggtaaaatgtctaatgggtaatccattctgatgagtctcaaagctcaatgtactccaataacttctgtaaggggatga

SEQ ID NO: 4715 - DNA, 135 bp, Bos taurus
  Clone ID: 16-LIB34-022-Q1-E1-D11
aacagggagacggcagtaagtcgagcctgagaagctgggtcctagcctaagtgaacgtaggcaaatcgggccagctaggcagagcacgaaggtagcttgggtcgggctcaattttttctgcgctgaggcataccg

SEQ ID NO: 4716 - DNA, 241 bp, Bos taurus
  Clone ID: 16-LIB34-022-Q1-E1-D7
ggttggttaagggtatttgtgcatcttcataagaaatcagaaaagcaagaaaaagcacagcacacagtgtgtatggattgcagtagctacagtacatactgtgtgccggtccaacaagagcccctgggtctgtctgacttgttcaagtgtccactgtggaaggatttggggaacctgaaaatactttgtacagataacttttgagaaatagctcaatgtggacgtagggaccaactaaaaa

SEQ ID NO: 4717 - DNA, 127 bp, Bos taurus
  Clone ID: 16-LIB34-025-Q1-E1-D7
aacgggtcgctatgacttcaccagcacaccaatgcctcaaattgtcagcttttgcagtgattaactacttccgcgagatagctctaatgtatttgggggcagggcaagggcaccccaatccagtact

SEQ ID NO: 4718 - DNA, 59 bp, Bos taurus
  Clone ID: 16-LIB34-034-Q1-E1-D7
agagtggttcacggcaagaagacgacaggcccactgcatgaatcgtgtacgagtcggaa

SEQ ID NO: 4719 - DNA, 402 bp, Bos taurus
  unsure (355): Clone ID: 16-LIB34-038-Q1-E1-D11
gttctagatcgcgagcggccgccctttttttttttttttgttttttaaattacgtttatttagcgtatgtacacataaaagagaaatcaccctctgttcccacccagcagaaaacatgcacaaacccaaggtatacatgaagggacagggccccagccccaagttagtggttgggatggtgcaatcctgtgagtcacaagccccggtcaggagagggctggactgaagtgttgggcaggctgtaccctcgctgcggggcctaaaataagcgcgcaccatagccaaaggtctgtttgatgccctcaaagtagtaccgctgccagccctgcctcgtcctctcctcctctggggcggngatgcctcggccttccatgcacagctcagtttctccgttcttatcga

SEQ ID NO: 4720 - DNA, 357 bp, Bos taurus
  Clone ID: 16-LIB34-043-Q1-E1-D7
gtgcgcggtcatgtaattcggtccggatggctcacgcagggaatgctcacccgaccccggaggaagagcctgtagcactacgcggtcgatcaactgagcctatcagtcctgcgagtgcgtggcgtctgcctcattaccggtctcatgtcgctgggcttcaccgggaccatcataagctacaacgtccagatgctcaacgaagcccgaatgagcagatcctcattgacagtctgtgacaagtacggatagctgaggagcagaaccagctagttgcgactgggcgataatccacacgaccgcctgcagatcgcgatcgacagcgctggtgtcactcatctccatggacgccagcgtgat

SEQ ID NO: 4721 - DNA, 347 bp, Bos taurus
  Clone ID: 16-LIB34-050-Q1-E1-D7
aaacttgatcagaggcagctgggactgtctgtgtgcaagacacccatgatgcatggacgggtccagttgtgcctagcctggctcgcactggatcgccactgcgcagatagcctggatcatttgtgcgctaagctgtaggaatccatgctggtagacttgtagcagtggtggcatctagctatgtatacacgacgcccacagttggtacgtggacatgctggacaacatgggaaacagggatcccacagatacaacgcggatctatcggctcgatgtatgcgtgcactacatagaatagagggtccagcatggactgatgggagtatgcgaggcccaggcacaggaca

SEQ ID NO: 4722 - DNA, 237 bp, Bos taurus
  Clone ID: 16-LIB34-054-Q1-E1-D7
cttagccgcgctcggagccctgccgaggaggctgccgccgccgccaggagcccgcagcccgtgccccgagcccgccgccaccgccctccgagggcgccccaggccgcgccatggtgaaggtgacgttcaactcggctctggcccagaaggaggccaagaaggacgagtccaagagcggcgaggaggcgctcatcattcctccggacgccgttgccgtggactgcaaggacccagatg

SEQ ID NO: 4723 - DNA, 366 bp, Bos taurus
  Clone ID: 16-LIB34-056-Q1-E1-D7
tctgaatgaatcatgaataagaatagctgtttattgtggatttatttaaaactgtcctttaaaagaaaacgaagaagctataagctaatctaattgccaagttggaattcattatttagtttacctcctatgcaatgattaatgctgcaaaatgtatggttatgttttgctatattcacaaaagaaatattacaaggtttgagaggtagctaattgcatctttcggaaatttactgtactgtttcaatgtgttaagtgccttgttgtaaagtaaaattctaagtctagaattcattattttcctgacatatatttttcattatgatatatactgtatattattgtaatagttttattaaatgctta

SEQ ID NO: 4724 - DNA, 209 bp, Bos taurus
  Clone ID: 16-LIB34-058-Q1-E1-D11
gagttattggtgatacttgttcaatggtgcacgcggaaattcataaccgaagtcgtctcaactgtcatcaaaatcattgtaatcagcgccttaacttaaggattaacagaaaaatgacatatccgtcgtccacagctgtcagttccgaccatatgtccatgtggcaacatcgagttacatcaacactccttcaaatatatgggattttc

SEQ ID NO: 4725 - DNA, 204 bp, Bos taurus
  Clone ID: 16-LIB34-059-Q1-E1-D7
gaattcttgggttaagggcaaaagctgcttagcagcaggcttgctgcagcaccaggtggccatcgtcaccggtgggggcacgggcatcgggaaggccatcgtgaacgagctcctgcatctgggatgtaatgtggtcattgcgtcccgtaagtttgataggttaaaatctgctgcagatgaactgaatgccagtctgtctcctat

SEQ ID NO: 4726 - DNA, 65 bp, Bos taurus
  Clone ID: 16-LIB34-062-Q1-E1-D7
ccggcaggcgtgggtccatgcaagcctccatcggcagtcggagtacaccaagagcatgagctcag

SEQ ID NO: 4727 - DNA, 354 bp, Bos taurus
  unsure (152),(302): unsure at all n locations; Clone ID: 16-LIB34-063-Q1-E1-D7
ctctgaattcttgtgtcttatttctcattctctcgccgtattgcgctttcagaaaccctgcttgtcaagcgtgtctcgacaagtggtgccgaaatagggacccgaaagtaaatccagcctgagaagctagttcctagccgaggtgaacgtanggaaatctggccagctaggcggaagaagaaagtacttggctctggctcaattttttctgcgctgaggcataaggaacctgagctatttggaacccctggaaagccatctagtggtgtccaacctgataccatctgcctgggagcatacanaacagtcaactttcagtttctttcaaggcaagagcatcatgcacccttgggt

SEQ ID NO: 4728 - DNA, 232 bp, Bos taurus
  Clone ID: 16-LIB34-069-Q1-E1-D11
aaataaccttacctttctgcaggagagagagaattttgagagcaagaatagcagagtatgaacccacctcttaatgcctttcccctgcagtgaccacttgattccaccttattcttctgcctattcctggactcgtcacttctctggaaggtccacttccaagtcacctcctcctctcactctgtcacacaacacagcctacagatgaaacggtctttctacggatgcctcg

SEQ ID NO: 4729 - DNA, 287 bp, Bos taurus
  unsure (1),(7)...(9),(19),(34)...(35),(50),(53),(70),(74),(78),(81),(84),(90),(95),(98),(102),(110)...(111),(142),(146),(157)...(158),(201),(204)...(205),(280): unsure at all n locations; Clone ID: 16-LIB34-070-Q1-E1-D7
ntccggnnnagtcagcccntaatccacgggcagnnagatggtttttccgntgnagggggacctctggccntggntccntgnagntttggntgggntgncaanttataganncagaagatggggtagtggatctctccccagntggntgacctttttnntaactgaagggagggagggggtgcggtgggcccaaagacttgntgnngaaagacagcaatcctgcctgcaaaggagacaggggctggcccttctggctcctgatgaaggactgggaatacanaaatgcc

SEQ ID NO: 4730 - DNA, 344 bp, Bos taurus
  Clone ID: 16-LIB34-076-Q1-E1-D7
ccgggtcgacacacgaatctgcgcagcgtcgtgtcagacgtctaaatcggatttcagctttccacattgctgtgtcctttgtggatgatcgttactgtgggcctccttctgacagtgcttctgtctgcagagatcttgccagcctgagtcgagacggtgtcacagattttggggaggccctaggctgcaatctacttcacagtggatccttttcactgtttacccgtcctgtgagatcaattgttttcttaactctcgagtgctctgcgggctgtgccgattctgactgctgctggactggggttgagcattgatctgcgaagttcagtaatactagctcttta

SEQ ID NO: 4731 - DNA, 374 bp, Bos taurus
  Clone ID: 16-LIB34-081-Q1-E1-D7
gtccgggccagcagtgctggagctctacccccagctgtttgtggcactgctgctgcgggtcagctgcaccgtgggtgtccagccgcccaggcagctgcaggccaaggagaggaggagcgccagctcgggcctggcctcacggagcctcgagccttgcagctctgcggtggacgcgctgcaggccgtgcttgtccgcggtggcaatgaggatgtggtccagtgcatggagctggacgggggctggcagttgctcaggacctcggctgggcacgaggaaggtgtcacccggctggccagtgccatggcaaagttcgcaggcccccggctgcccctggtgatgaagctgctcttcaccacacagagtagcatgtatg

SEQ ID NO: 4732 - DNA, 429 bp, Bos taurus
  unsure (392): Clone ID: 16-LIB34-082-Q1-E1-D11
agcaccaccaccgcccgcaaacacagttcggccactgaccgccgcagcagccgcaggcagcagccgccgggagcgggaacactgagctacccagcagcaggggatctcgaggcgccggaggaagcaagggctcgacccagggaccacgagctgatatcgcaagcttccggacgccaaagccagaagtcgcgcatcccgcagggccgggctgcgatcaagacgagagttggagagggcggaggaggagccgggaatcccgccgcaccggcagtagccaggctcccgcgcgggcctctcagagcgcgtgaaggcgggcagcccctcgccctagccggccatcccgtgcccctgcgcccctgtgcttcggcgcccacgcggccaacatgatgcanatttgcgacacctacaaccagaagcactcgctcttta

SEQ ID NO: 4733 - DNA, 139 bp, Bos taurus
  Clone ID: 17-LIB34-002-Q1-E1-E9
ttctaatggttgttgagcagatctttacggggcatacgttcaaccctcctacaactgaatagaaccccttttttaagtaaaacgccgaaaggttgtccatcctctaagcttttacggggatggcaaacatcgtgaaccc

SEQ ID NO: 4734 - DNA, 381 bp, Bos taurus
  Clone ID: 17-LIB34-006-Q1-E1-E9
cgccatattggaagggcgccgccgccgccgcttcttcctcagccgcgtcctcttttaccgcctccgtcttgttgcggctgcctcacggccgcggccacagaaagtatacagcccctcgtccgccccaccgacgccgggcccacccgctccccctccgcccgtctcctcatgactgcatccagccccgctgccgacggacgtctccccagtgaccggtcctaacacggaagcgcgggtcgggggccgcggatggaggaagagggagacccggcaggtcctgcgtccctctcggcccggcgcggcggatccatgacctcgctgacccagcgcagctccgggctggtgcagcggcgtatcgaggcctcccgcaacgccgccgac

SEQ ID NO: 4735 - DNA, 394 bp, Bos taurus
  Clone ID: 17-LIB34-015-Q1-E1-E9
attgatagaacccagctgataaaactcaccaggaacatactagtagccctacaatgttaggtttattaacttgctgcagaatgaaatttaggtaaaatttaaatgaagcaatgctttgaaagagtcaaagcaaagcaagcggtgtctaaaagagataatatcaagcctggcctggaatatcctaattccttgaaaatggtaaagttaaaagaaatgttagatgtcattgctgaaacctctcttcttgaaacaactgggttgggaatgaagactcctaattcggagtcaaaatgacccatacaatggaataccactcagaaataaatacatgaagcagcataggtgaatctcaacataaatatacggagtgaaagaagccaggcaaaaaacagta

SEQ ID NO: 4736 - DNA, 212 bp, Bos taurus
  Clone ID: 17-LIB34-028-Q1-E1-E1
cagacgcgtgggcggcgacagccgctcggcgctcaggaccgacggccaaagctcctgcgaacttgggcgcagagtcgcgccactgcgcccgcggcccgagcgatgaagatggtggccgcgtggacgcggttctactccaacagctgctgcctctgctgccatgtccgcactggcaccatcgtgctccgcgtctggtacttgatcctcaatgc

SEQ ID NO: 4737 - DNA, 56 bp, Bos taurus
  unsure (8),(44): unsure at all n locations; Clone ID: 17-LIB34-031-Q1-E1-E1
gacccacngcgtccgacattacatctcccaaacctcttactgantgacatgcagat

SEQ ID NO: 4738 - DNA, 362 bp, Bos taurus
  Clone ID: 17-LIB34-033-Q1-E1-E9
cgcgagcggccgcccttttttgtttttattgaagaagttatggaagcctttactttacgggagcaacagatgtatcattttgacagatattcataataatctttcacaataaactccaggaattgcattactgtctttagtgctttgggaacatttatagtggccttcaaacatgtctgtgtttaacagtttccactataatagcgtcatcacaaaattcatcatacatttgtgttacatacagtacacatttctgaagttcttcgtcactggctaagaattacagaaaatggctgacaacaaactttgacattgtgcagttcggttgcacagtcctgtccgactctttgccactgaactga

SEQ ID NO: 4739 - DNA, 350 bp, Bos taurus
  Clone ID: 17-LIB34-040-Q1-E1-E9
gccccccagtcgaaatcagcccatcattgagtggcatgtactccctgcccttcctcacggccccaggctcccagctccggggctacgtgccagtggcccccatctgcactgacaaaatcaatgctgccgactatgccagagtgaaggcatcagttcttatcgtttatggagaccaggaccccatgggtcagaccagctttgagcacctgaaacagctgcccaaccaccgggtgttggtcatggagggggcggggcacccctgttaccttgagaaacccgaggagtggcatacagggctgctggatttcctgcaggggctagcatgaggagcagccctgctgatgggggtg

SEQ ID NO: 4740 - DNA, 412 bp, Bos taurus
  Clone ID: 17-LIB34-041-Q1-E1-E1
acggtcctagacttcccgggccaccccacgcgtccgaaaacttcaaccttgtctttcgcagctgcgaccaactgacatcaggtttgagggtttcacgaccactcttcatgcagtttggcaggggcacccaatagaccagatcctaatgggcaacaaccacacaaggaaagtaacttcccggacatgatcaataaagtgacagatctcatcactgtacgctaggacaatatatttctgagtaataatacttactaaccagacgctagatattggctaaatcagagcaatacaaaggtatcctgatatctgtaaaacattatagagacttctatccttaatcactgtattgtcagtaaagctttatctcacctgccactgtatatcctcagtacagagatctctgcatcttgtc

SEQ ID NO: 4741 - DNA, 373 bp, Bos taurus
  Clone ID: 17-LIB34-043-Q1-E1-E1
gcaaggttgtggatggaggaacttcctttgagtttaatgacggagccattgcttcaatgttgatcgagaaagaagacgagcttcgaactgtgcttctggagcagtgaaggattgcctcagatgacaattttgattgctagagaaatagttttactgcagaagcagcctaccagtcataaagctacagtttttggttgttgagactgattggccttgggctgaaaggtgaccaagaaagtgagatttgcattatttttctgacggattctgatggaaaagatgttcagcatgtaagaaaatggaggactaaactgattagaattcataacagtgagattttgatactgcttacagttggtttccaagagtgctg

SEQ ID NO: 4742 - DNA, 155 bp, Bos taurus
  Clone ID: 17-LIB34-047-Q1-E1-E1
ccgggtcgaccagcgtcccacagaggtatcagttttgctgaacactgaccttagtaatggacacctcttccaacacgtcactattaacttctatcacgtgttagaatctgtgtcaagtaccacgcagtgtggggcacagctccgaaattctgttt

SEQ ID NO: 4743 - DNA, 88 bp, Bos taurus
  Clone ID: 17-LIB34-047-Q1-E1-E9
gtcgacccacgcagtccgcatctcctcagtccatagggaggggtggcaacgaattagcgacgtgttataactgggtgtctttagtttc

SEQ ID NO: 4744 - DNA, 242 bp, Bos taurus
  Clone ID: 17-LIB34-054-Q1-E1-E1
atcgcgagcggccgcccgcgatctagaactagtatgtgttcttccacctttggacttggatgggaattaaactcttcaggcataattaacgcagccagagccaagatggtatattctaaagatatgcttgagtgcctgtctctgaaggctcgtctacatgggaatactggaaacccgcttaatttgcaggagagatgctttgcctagctttctgtcaggggtctagggtctatgagaggctt

SEQ ID NO: 4745 - DNA, 353 bp, Bos taurus
  Clone ID: 17-LIB34-055-Q1-E1-E1
agctgcattgctttacgcctgaaaccctacagccttcccccattggaaagtattgtaaacaccagatgattttagttaagtagcaaagatctttccaggctttattttacattttatcttaatagcctaattgataagattatgatgtatatcctaatattagtaatctttggtagtttgaggaggtagcaaagggtgagccctttgggttttaacttactctccctttttctatacttttcctgtgctgtgcattttaatttttgcttattttatctttcataaaattttgttgaagcagtggttcttaacgggctgatactagaattgttggagaatctttatgttttgtt

SEQ ID NO: 4746 - DNA, 228 bp, Bos taurus
  Clone ID: 17-LIB34-057-Q1-E1-E9
ggcccggtggctggagaagacccagcaggcccaggccaccctgcaaaagctgaaggcagaggagtatatccaacagaagagggagctcttggccctctatcgggaccgagatggggagtccccatgcaccaggccctccacgccttcccaggagggctctcagaacagcacggagggcaggacttgcgagtcctcgactgtcatcccccacctggtggtgacagaaga

SEQ ID NO: 4747 - DNA, 208 bp, Bos taurus
  Clone ID: 17-LIB34-062-Q1-E1-E9
gagaaggctcctgggtggaagccttccctcaggctctgctccccactggggagcccccgagatgcccctgccctcagtttccctcatcatcctgcctctgcctccctctccggccacagcctctggtaccaactctagcaatacggccagaatagtcagagctccccgcccctccagacctgcagttcctgcctctgtgccttcgctc

SEQ ID NO: 4748 - DNA, 231 bp, Bos taurus
  Clone ID: 17-LIB34-067-Q1-E1-E1
actttctggattataatttgaaatggacagatttcaaccatttgaatagaaaaaataatggtagtgcttgtagaaaatacctttttgagtttgaggcattcagaactcaagtttttagtagggttctatcctgcaatctgctttctcttctttttcctgtacttactgatgttatcaaacagccagttaaaatctgtgttcattatgtatcctatgacttttctagttatg

SEQ ID NO: 4749 - DNA, 164 bp, Bos taurus
  Clone ID: 17-LIB34-068-Q1-E1-E1
gggtcgaccaaacgtccggccaacaaaccaaccggcaacaaatttgagaaattcccaataaccttaaccaaagaagaatttgaaggagccttggaaaaatttggccggaaacgggcaaacccgacaaatcaatttgggcattcccttggtacggcaaacctaat

SEQ ID NO: 4750 - DNA, 409 bp, Bos taurus
  Clone ID: 17-LIB34-074-Q1-E1-E1
acgccgagccccagtcctttgaaatactcccagcttgggggtttagtaaacttgtaatttttacttacaaattcaccctttctgtattttgcaatttaaaacattttggttgttttgaatcctgtgaatgtggcttgatggtaagattcctctggcagctggcagtcggggggctggggacacgggagcccctgccggcagccgtggactctgcgagtccccggctcctctcaccctatggtccccgtctcagtttgcttttgttttaaggaggatatcctggagtaaattttaggttaccatagcgactttgttttagaggaattttgtttaaaagaaaatagtaccattctgaactttgcgatgacccccttatgacattttctgaaaatgaaaaccatcagctatg

SEQ ID NO: 4751 - DNA, 439 bp, Bos taurus
  Clone ID: 17-LIB34-077-Q1-E1-E9
catatgccacgggtgtgtttcgtcgcgatacagacacgagtgagattgctcatcggtttaaagtgaggacagacgcccacaggctgatgcagttttgccccggcgcacggctcacagggatttatcaagaggggtcgaagtcctttttcactactgtttgccatgcatagttccccaacagcttacgagtctggtccaccagattggtatcccaagatccagtgttttcacatgtaacttcagtacggctcttagaaggattatgttacaaagaagcatttaccttagcatcactttatcctagacactagcattgattaccaaaacttaatttccactttccatagctcagaatcttaaaatccagggcatgagcaattaaattattttacttctgtttactttctctggtgggacaatttcagccctgaaatgggag

SEQ ID NO: 4752 - DNA, 330 bp, Bos taurus
  unsure (97): Clone ID: 17-LIB34-081-Q1-E1-E9
atgcaaaatcaaaaaaggtgcaatgtaggagacaggaagaataaaagaacagcaagtcctggcaagggctgcaagagcaattcataattattgatanactggatgctataaggcatgagactcttggaacaagtccagagggaacagttcataatcttaaaaacaagatatgatcctggagtcagaaaaccaaccccagactgtcttccaactggcatctaagagtcatatgctttacgtgtctggtagaaaatctatagataagaatatcagtcttagttactgatttgttattgatgatggtttcctccaagccaggcttcatcaata

SEQ ID NO: 4753 - DNA, 404 bp, Bos taurus
  Clone ID: 18-LIB34-005-Q1-E1-E5
gtttatcgcgaacgtgattggaaccactctataagtcagtattcagaagctttgagtatagctgattatgcaaagtctgaagaaattttaatccctaaagaaatcattgaaaaactatatataaatcgtattgcttgctattccaatatgggtttccatgataaagttttagaagactgtgatacagtcctcagtttaaatgccagtaactacaaagctctgtatcggaaatccaaggctctaagtgatttaggaagattcagagaggcttatgatgctgtagcaaagtgctccttggcagtgcctcaggatgaacatgtaataaaactaactcaagaactagctcagaaattgggatttaaaataagaaaagcatatgttagagccgagctctcactaaaatc

SEQ ID NO: 4754 - DNA, 53 bp, Bos taurus
  Clone ID: 18-LIB34-011-Q1-E1-E5
cgcacgcgctacgagcatgtagtacgtattctttgtgtttgccttcagggctg

SEQ ID NO: 4755 - DNA, 412 bp, Bos taurus
  Clone ID: 18-LIB34-018-Q1-E1-E5
aggtcgctgccaggggcacttggaacggtgcccgttcattgttcccctgtggcagtgcggacagggccacttggctgcagccttcctggggccacgggacctaaagagggcgctgggagcacgcggtctgccctgacttggaactcggaggcgtgaaccggctgagggctggctctggttttctctgcccaggctgagctggaaaggtcttagccccaaaggaagcagtaaggatgttgctgtcccagcctggagtcttctcagctcctcacggaggctcccaccaaggaaaagtagcagccagcatcttgagctcggggccttctccaggctaaccctaaccccgccaccgaagagctcacgccccaggggcgtcatcacgccaccccttcactcctcccccgacccgttt

SEQ ID NO: 4756 - DNA, 292 bp, Bos taurus
  Clone ID: 18-LIB34-019-Q1-E1-E5
gttgaggtcattggtagatctccaggaagagttgcttttccagtacccagacactaggtatctcgtagatgggacaaaacccaaagcagaaagtgaagaggagatttccagtgatgatgaagagctcgtagagaagaagaagccgcagaggagggccccgacaaagaggaagctggagacgggggactaccccagcttcatggcgaagcgcttcgccgacttcactgtctataggaaccgcacgctccagaagtggcaccataagaccaagctggcttctgggaaactgggg

SEQ ID NO: 4757 - DNA, 411 bp, Bos taurus
  Clone ID: 18-LIB34-030-Q1-E1-E5
ctccttcctgctattttgttaatcctgctgttctttaatctgattttcatcccttctacagtgaaaccatggtctctaatgacctgcgttaaattctgctgctggatctttgcagctttgcagattcttccttggtttgtgacaccatttctcttcaatttctatgttctcattccctctacttttcaaacgttggcgtttggggggattcttttcttggtcttattcattctttccttgctctacaaactccaatttgataccttattcattcctataattccagaatcattgttaaagttatgagcctcgtgtctgcattttcacttgcaataacttacacgaactgccatctcacatgttcagccatatgtctgctatacttagttgtttcacagcatctcagtacat

SEQ ID NO: 4758 - DNA, 418 bp, Bos taurus
  Clone ID: 18-LIB34-034-Q1-E1-E5
tgataaaataggaataacatacataggaatggattgatggggtgacctcgggtattcacttgtatgaatctatttgaaaagattaaatgagggtgaatatcatgctagatgggcaaaattgtcacattcaggacagctgttttgactgctaagccaaaagtcactgttcagaaacataggaaaaaagaccaaacagagcatgacatatagtctatttaaggggagaaattacagagtaggacttctgcatttaggtgagggagctacccccctagagtaaatgattgctcaggttcctaaaacttaatacccaccatggtcattttctccccagtgatacataccataaacttttaatctgaccataggaattcaatggtgggttgaaaatgaatcaagaaataacaatacataaaat

SEQ ID NO: 4759 - DNA, 422 bp, Bos taurus
  Clone ID: 18-LIB34-048-Q1-E1-E9
taaaaatgtgaaagttgaatttagtggatgatctttacagttccatatgtataatgtgccaggtaactcatctgccccttaagaagggaaccttgaactacataaactgtacctttgatgtgcctaatagtttcagatgttttagttttttttttaataaccatagttgattagaccaagaggcattcttttattatttaagatggtaaaagtagcaggaactagagaaggttaaaagattcatggttttgtgagtattaaccatcttgtattagacatgcattatattaatttaatcattgatgccttacaaaagaaaacatcttttctaataccctgaatatgtgcagttcttaggattattattatatatggattctttcaaaagttgtttgtgaaattagttttcgctcaagaatctc

SEQ ID NO: 4760 - DNA, 111 bp, Bos taurus
  Clone ID: 18-LIB34-052-Q1-E1-E9
ctctgtgattgtcttcatttcgttgaatttgcttttctttgagcttctctgattcatttagttccacaagtctatcattccatgttcacctaatcgctatccttcctgctc

SEQ ID NO: 4761 - DNA, 237 bp, Bos taurus
  Clone ID: 18-LIB34-054-Q1-E1-E5
ggctccctagtcacctatagtttagctactcaccagtgactagaatctgtacatgaaaaaacggtgggggatatagatgcagtatttattaccttgaggagctggggttataactggtacatcctgatcaaagttaacctgaaacagttaactggacatggataacaggaaagtgacatgttaaatttagaggaaatgtagctaatgtctaataagaaatggaggacttgctttcct

SEQ ID NO: 4762 - DNA, 345 bp, Bos taurus
  Clone ID: 18-LIB34-056-Q1-E1-E9
agaaggacaagtccgcccaggcagtggtctaagggtgaccggacatctagaaaccccagtctccttctttctccattcctgggctgaaggaaacatctgaacatgtggaatcccaatgccgggcagccaggaccatatccacacccccctaacgctgggtatcctggaggttgcaatcctgcccatccaccacctgccaaccctccctttcctccaggcccctttcccactcccccaggagcaccccaggggaatccagcctttccccctggtgggccctgtcatcctgtgccacagccaggatatccaggatgccagccctcaagtctctacccgcctccatac

SEQ ID NO: 4763 - DNA, 221 bp, Bos taurus
  Clone ID: 18-LIB34-058-Q1-E1-E5
atctaagtctaggtacatttagaacaaggacatttatctgcagccaagacatttgtatttgcttgataaattgagctcaaagagacgaaaggttcatctgctgagcataagcatgttagcattatgtctgtaggttaaagttctgcttctttggttgccatataccgatcatcatgctcatgacttagaggttgtgaagagccttgtccctcttggtttct

SEQ ID NO: 4764 - DNA, 55 bp, Bos taurus
  Clone ID: 18-LIB34-063-Q1-E1-E9
cctcctgctgctctggggtctgttcctgagcccattcactgagtacgccacgttc

SEQ ID NO: 4765 - DNA, 216 bp, Bos taurus
  Clone ID: 18-LIB34-065-Q1-E1-E5
aggctggagggcagcctgaactcgggatcatgtccatggttcctccctcgctgctctgtcttgggttgtgtctgagccagagcacttgggcacagaagggaactctccccccgcctcgtatcacagctctgcctgcatccacagttccagctaagagtcctgtgaccctcctgtgtcaaggacctaaacaagctgaggggtacaggatatcaagag

SEQ ID NO: 4766 - DNA, 195 bp, Bos taurus
  Clone ID: 18-LIB34-065-Q1-E1-E9
ggctgccggggcaagaaagttcttgttagaactttccacctctggcttcccctccacccctcttactgtcccaaccttcggagacgctttttctcctccggaggatttatcttttttttttttctcccccctctttttctcaccgggtgcttgctttgcatttgggaagaggtgatttcaagagtggccaggtgg

SEQ ID NO: 4767 - DNA, 252 bp, Bos taurus
  Clone ID: 18-LIB34-066-Q1-E1-E5
aagtggagtacttccttgtcctctaccccccactttaatgtcacctcagttttcccagtgcttctggggaacctaacagctaccatgcaggctgcagggaatatgtgaggcttccttagtcatcttcatgtcaccattttgtctttcttttctccacagccccacatctactctccttcattggaatcaggggtcccttagccccatttgccttttctgtcttttgggaccccggggccaagcagtcctcca

SEQ ID NO: 4768 - DNA, 233 bp, Bos taurus
  Clone ID: 18-LIB34-067-Q1-E1-E5
ctcaggtcagcgccatggcggcccagttggctagagtccggtggggcactgtctttgccgctgcccagaagggcccgcgggtctcctgccggaggtgggctggcgcctcggcggacaacgtgtacgatgtggtggtgtcggggggaggcctggtaggcgccgctatggcttgtgccttaggacatgatattcacttttgtgacaagaaaatactgttgttagaagcaggtcca

SEQ ID NO: 4769 - DNA, 74 bp, Bos taurus
  Clone ID: 18-LIB34-068-Q1-E1-E5
ggtagacccaaacgtccggtaaactggatatttgtgtaatgtaccactgggaaaatctaacatgttgaatgtta

SEQ ID NO: 4770 - DNA, 200 bp, Bos taurus
  Clone ID: 18-LIB34-070-Q1-E1-E5
ggtcaacccaaagtcgaccgagtccggccccgatgcccaccactcccactcctgccccctcactgtacctggggggaacgatccggcccgatcccaccagccggactcctgccctcactgtcctggggggaacagtccggcgcgatccacccatctcccagctcctgcccctcactgtacctggggggaagcgagtcccg

SEQ ID NO: 4771 - DNA, 413 bp, Bos taurus
  Clone ID: 18-LIB34-076-Q1-E1-E9
ccggctcgacccacacgtcagcggacgcgtgggtgagaacattgctacattggtgaggaggtaaggcccatttgggtctgagtgtaggttcatctagttaatgttttcaaagttaactgccattttaaaaactagaaaggaaactggaacttgtcatttgcaggttgctataacttgacagttgaatgaaaataacccttaactctagaggaattactttcataacctgtcaattgtagggcttgttcacaaatgggaaaaactaagtggtcagttgataattgatctctggtataagcaatgtaattctaagttaaccttggttttgatagtcttacacatttgcagaaactgagtaattctgtatctgataactaggcttttataataggaaaattaatccagctgaaact

SEQ ID NO: 4772 - DNA, 330 bp, Bos taurus
  Clone ID: 18-LIB34-079-Q1-E1-E5
acgctgcatctcacttctgagaactcagagccccgctgccggaggcactgaccacatcagggcggcaggctcccccaccgtgggaaacgacaaagttcctgccgttccctcgaaaactgaaaggtgaagctttgcaggaaactggcatccagtggccggggtggggcggtgtgctgggtggggctgtgagagccgccggcccatggccttcagtctctgaggagcatgaatattggtgacaggaatcacattaatttacttcaaaatatagttgcctttttctctcaagaatttgggagccctgaaggggtctgccttcattctgtggat

SEQ ID NO: 4773 - DNA, 385 bp, Bos taurus
  unsure (277),(282),(312): unsure at all n locations; Clone ID: 18-LIB34-082-Q1-E1-E9
gttctgcagacttccaacgcggatgtgagagcccccgccccatctcaggatggggtagcctccactggccacgataagcggtcaggcccagggcctgtcagcaaccctggataagctgactgctccccggtggtcagcgtgacatggtttccagaagatagcacacgttcctccatagaaagtgctagatggcgtccatgagggctgaagaggggactcagggtctcctggccctgcctgtgtccccaggtcatggtcgtacccgcttggagtgtcncgtcncagcacctggggcctcgagggcagccttcncaatccgtgctgtctcgggcacatcctgtcctattctcaagaccttacccattacaatgttacatcccggtat

SEQ ID NO: 4774 - DNA, 401 bp, Bos taurus
  Clone ID: 19-LIB34-009-Q1-E1-E11
atttttcccttcattcccagcttttcctgcgctcattttaccaagtggccagactgaaggcttacatgttgcgtcccctgaatgcctttcaggtgggttaagtgtggattgagagtacctgtgaagtgcccataaaaagcagcctgggagccttgcctgcttgcactcaccgacctttctgctccttgtcatgacctattctgcagttgatctttttgagaggtgggaacaggattctcctcagggtacagtttcaggaaatgagtgaaaggcaactgacaagtgcaaagaaatatactttttaaactactgtcaaggctactgctaatccctgggcataatggtatttttattttaacgcctgtacgctagctcaaagtcctttaaggaaatgaaagttg

SEQ ID NO: 4775 - DNA, 410 bp, Bos taurus
  Clone ID: 19-LIB34-010-Q1-E2-E11
tccgggtccaccacgcgtcggctttcaggaaacaaattttatgaagtgttttcataagttatacactttttaaaagctacgttgctaattaaaatgcatttatatttaatgcattggtgggtagaatttttttgaactagaatcgtcattaaagtctatttgtagctgtacattttgtttgtaacttttggcttaaatatgttttctgtttggggtactgaattttttataggtattctttcacatttagagcctaatctctttcaaggcaatgttctacattacctttccacaggtgatgtgttaatattatacatgtcataagaaaatgacttaattttaagcatgtgaataagtatatttgatagcaaatgctcaaaggagttaaatctgtgagcactttttaacat

SEQ ID NO: 4776 - DNA, 345 bp, Bos taurus
  Clone ID: 19-LIB34-011-Q1-E1-E11
cccacgcgtccgcagacgcgtgggggccggcggaggacaagagggctgcgcagctgcgacaagtttatgtagggagggggtcgcagctcgtagcttaaggcgtcagagagctacgcggctgagggacatgtcggcggcctctttggtgtcggtgctgctcgtggcggcggagaggcaccggtggcagcgagtcccgcgcttgctgctgccgccgaggggatgggcttggaagtctagagcgaaagatgatttcttgcaacttcgataggttgtataccatgatacatctattactgctaaatctctgtgcttttataattcaggctcaactttccgacagactat

SEQ ID NO: 4777 - DNA, 71 bp, Bos taurus
  Clone ID: 19-LIB34-022-Q1-E1-E3
gtccacgcaagtctctagatcgagtcgtcttacggtcgcccttctttttcatttttctatctttctgttca

SEQ ID NO: 4778 - DNA, 411 bp, Bos taurus
  Clone ID: 19-LIB34-026-Q1-E1-E11
caaagagcatggccgagaacaggcatctcgagtatgaacggtttgtggtggctttcggagaggacatgagacagctggccgatggctccatggacgcagtggtcagcaccttggtactgtgctcagtggagaatccaaagagagtcctgcaggaagttcggagagttctgaggccgggaggagtgttctttttctgggagcatatggcggagccgcgtggaagctgggccttcttgtggcagcaagttttagagcccacctggaagcacattggggatggctgccacctcaccagagagacctggagagatctggagaatgcccagttctctgaactccaagtggaacaacagccccctcgcatcaagtggttacctgtagggccccacatcatgggaaaggcggtgaaat

SEQ ID NO: 4779 - DNA, 206 bp, Bos taurus
  Clone ID: 19-LIB34-032-Q1-E1-E3
ggaacggtctcccagaagcaatttagaatgactggtaaaacgaaatatacccaaagctcgcagcaacaaaaaaggatacagttctttctggccagcttcctgcttctgccctttccgctcctccgcatcgtaaaatcccccctgaaactttttaatcctaaaaaaaaaaaatcaatcaacggaaaaaatggccctaataacggaac

SEQ ID NO: 4780 - DNA, 146 bp, Bos taurus
  Clone ID: 19-LIB34-033-Q1-E1-E11
gccatctactgccgcggtgaggctgggcagggggactcgggattggcgcccctgccccgacctccggaagccccacctggacggacgcagcgttacgaccagattcatcatgccagccaaagttatcgctagtaaaataaactata

SEQ ID NO: 4781 - DNA, 412 bp, Bos taurus
  Clone ID: 19-LIB34-033-Q1-E1-E3
ccaaatcgcttgaaagtgaataattaggataaaaatgtacactatcaagctctttcttattattgctcctctagttatttcttccagaactgaccaagactatacatcacttgactctatatctccagagccaaaatcaagatttgctatgttagatgatgtaaaaattttagccaatggcctacttcagttaggacatggtcttaaagactttgttcataagactaagggccaaattaatgacatatttcaaaaactcaacatatttgatcagtccttttatgacttatcactgcaaaccaatgaaatcaaagaagaagaaaaggaacttagaagagcgacatccaaactgcaagtcaaaaacgaagaagttaagaacatgtcaccttaaactcgactcaaaacttgaaag

SEQ ID NO: 4782 - DNA, 275 bp, Bos taurus
  Clone ID: 19-LIB34-037-Q1-E1-E3
gaaaatttctctgattgtagcgttgtgactgcagctcagtgtatgagggcttggaatccagcctgagagacctgaagctccaagttggtctgcaaatggaacactggacaatcaggcatgcatagaaattcactatccgactcttttctactctccaggcttccatgttcagatttccctttagttcgctggccttccactaatgcatcatgtgacctgggaatattgagttgctatgtaaataggattcggaataagtgtcctcaaggtttctt

SEQ ID NO: 4783 - DNA, 239 bp, Bos taurus
  Clone ID: 19-LIB34-040-Q1-E1-E11
cccacgcggtcgccaaatgttaacagctgtttttaaatgtttaaatcatgccaaacaaatcatgtctgtgccatccagggtttagtgtaatcttttactgagtacttggattgggaaaaagggcttgtactaggcactttttattaatgaataaatacgacacattagtagaacaaacaaagccaaagcacagaaaccgaaggcgtgaagacaagaaaaaaacggcgggtgagcgagac

SEQ ID NO: 4784 - DNA, 418 bp, Bos taurus
  Clone ID: 19-LIB34-044-Q1-E1-E3
aggaacttggtgaggcaaggtcatttgtccagtttcaatagcctaaagcatggttgccctttgttttttgaatgttccaaaaatgtttaaatcaagtgatcaggaaaaagctctaattttctacttttgctaattttatgacactggccaaattagtattagttaacaaatcagtgatttgttaagccatttttaaacttattattatttctttgacataaaatagtgtttcagacagcattttaccagaagtcaattcagacaattttaggaaaaccttctcactgtcccccaacttgttttgttcattatgcatcagataacaaaagatatcaatacttcatgtctatactcttaaattttcattaaaaattttttttggggggggaatctgtctttggtggctagtttgtgtggc

SEQ ID NO: 4785 - DNA, 411 bp, Bos taurus
  Clone ID: 19-LIB34-047-Q1-E1-E3
tctgtatcttatgacttccataaatgactagttgatattcaaaaacatatttctgtgttttgagggttgggggaaaaaacactaaactataatttgaaaaaggcatattgcttccagatttcgatgtgtatggaaaaatactgttgcagtgaaaatcttggtacaaacttgtacagactaataaatcttttacacagtattcagttttgtaacctcctgctattgtacattgtatatttttttcactcatgtattatttaatatacattgatctctgctattttaagcttgcagataagtgatttgccctttcaggcaggccactttaataccactcagtaagattaataagaaatactaattttctggcggtttgttctcgagatacagttgcaaacgataaacattttt

SEQ ID NO: 4786 - DNA, 406 bp, Bos taurus
  Clone ID: 19-LIB34-050-Q1-E1-E11
gagctggtctacgttccctttcccagttttattactataccagaaaaggattatttttagtctctccctcccagctccaatagactagttgggtacctcactccccgagtcggtggtccttccccgagcccccatgtagctgggaagtgggacctgggggtggttggacccctgggatcctgaaggagggccagagagggcgcagaactccgtttctgttcctgttatccggacgcggccccctccgcctctcctcccgctgccatgcaccctgcggccttcccgcttcctgtggttgtggtcactgtgctgtggggagcggcccccagccgagggctcattcgagcgatctcggaccacaatgccagcatggactttgcagacctcccagctctctttggggctg

SEQ ID NO: 4787 - DNA, 245 bp, Bos taurus
  Clone ID: 19-LIB34-051-Q1-E1-E11
cgtcccttggagcctgtgagggcggatccttaccctctgtcgctacttctctgggaatgtggatgccacccagggttggggggcctctctacttcttccctctcgcccaggattcctccgccctctgacacagctgcttctgcagaaagacaaacctttggtctctacctgagaagccatgtcccttgtgctgtctctcgcctgtccaacctgtgccctgccctccagcttgtatttaagtccct

SEQ ID NO: 4788 - DNA, 225 bp, Bos taurus
  Clone ID: 19-LIB34-065-Q1-E1-E3
atccgcagtttgattttaatgtagataaagcagtgcaggcctttgtggatggcagtgcaattcaagttctaaaagaatggaatatgacaggaaaaaagaagaacaataagagaaaacgaagcaagtccaagcagcatcaaggcaacaaagatgctaaagacaaggcagagaggcccgaggcagggcccatgcagccaccaccgccccagatacagaatggccaca

SEQ ID NO: 4789 - DNA, 257 bp, Bos taurus
  Clone ID: 19-LIB34-066-Q1-E1-E3
ttcctcatggcggcggctgcggcggcggcggctggttgggtgcggcgctgtagcgattgatctgctgctagcctggcggctgagcgtcgagctccagcccggcctccgcgtgcccctcgggctccgcacccctgatgctgctcgggcgctgagcccgccccggccgggacgatggtgaagtatttcctgggccagagcgtgctccggagttcctgggaccaagtgttcgctgccttctggcagcggtacccgaatcc

SEQ ID NO: 4790 - DNA, 117 bp, Bos taurus
  Clone ID: 19-LIB34-068-Q1-E1-E3
ggcggcggctctggatccactgcccacaccccgctctcgcaggcagacataggaagagaaatgtccccctctgccggggatcggggcggccgcaggcatgctccaaattgccaaaac

SEQ ID NO: 4791 - DNA, 393 bp, Bos taurus
  Clone ID: 19-LIB34-080-Q1-E1-E11
acttcttcctatgttttggaattctggggacaatcggactggatgtgacactgcagaatagatgtaagtcgctgtttatctgctgtgatgtccttgtactgtctcaagttaacagcgctttgttctgttttgtttcttcagtgtttagttgcaattaccagctctcaaactatagtttgttttcaaaaagaaaaaaataacgaaatagttttttactggatttaaatgctgattaaaattctccccctttgaggttacctctgggctttttggtaatacttgcttttcccagcccagctgtggttttcgtttgtttttttctatgtttgtggtttttttcgtctgtacaagaaattttgttatgcactactactttttgtattctagacagtt

SEQ ID NO: 4792 - DNA, 416 bp, Bos taurus
  unsure (362),(399): unsure at all n locations; Clone ID: 19-LIB34-082-Q1-E1-E3
agctgtcatatataagatagttccaatttttttcttttgaataaaaaaaagttttataaacacaatataatattttcttacttccagcaacaatcccataatgacaagggaattgtcagaattagggggaatattaagctgtctaaatacttaaacccatactcgatatttctaagtagggtataagagtttttcttgtattttttaaatttgcttttgcctaagttatttttaagaggcctatatgtagtattatttctttggataatgctaagtacaaactgaaatgctatgtgtcatatataaatgtaacaacaggattaaatcacaggacaaggacaagccttcttgataagatgcanaaactgcaaaaatgaggacttctctggtggtccagangctgactctgcgctccc

SEQ ID NO: 4793 - DNA, 205 bp, Bos taurus
  Clone ID: 20-LIB34-002-Q1-E1-E7
acccacgcgtacagatgcctgacacatagagctggaccttatgctgctctttacagtaacaggttgcattttatgtggggactgtgtacgcactggcttccaagacagtgacctcaaggggtgtagctttgcacaaaccatacacagcaatgttggactactgcagaactagttgtaacattctggcagctaaattgccataaga

SEQ ID NO: 4794 - DNA, 410 bp, Bos taurus
  Clone ID: 20-LIB34-006-Q1-E1-E7
ggcagccgatggagccaccgatggacccgtccggaggggagcaagagcccggagccgtcaggctcctggatttgccctgggaagacgtgctgctcccacacgtcctgagccgggtgccgctgcgccagctgctctggctgcagcgcgtcagtcgggctttccgggcgctagtgcaactgcacctcgcccggctgcgccgcttcgacgccgctcaggtgggtccgcagattccacgggccgcattggcctggctgctgcgggacgccgaggggctgcaggagctggcgctggcgccgtgtcacgaatggctgtcggacgaggatctggtgccggtgttggcgcggaatccgcagctgcggagtgtggcgctggccggctgcgggcaactgagccgccgcgcgctgggggcg

SEQ ID NO: 4795 - DNA, 420 bp, Bos taurus
  Clone ID: 20-LIB34-007-Q1-E1-E7
ggaatattgattattgctaaatctttctactaaatttttaaaatccattttagaagtcagagtacacttttttttcatggaataggtggtcagagggagcacctttacttcttttggtgaagttgaaccataattagaagtttgcagtttgcctttcacaaatgtcagttggaagccgtttgtatcttgttggttatttgcaagaagagaaggggaaaaaaaagtatcaaaatatgactttgaagtgtatataatttataagtgaggctgttgctataaagtgaggctgttactgtcctttgtgaaatataaaatcatactttaccagttataatggttgagattttcctcagtgtttttctataataatcatttacaaaaaacaactctctaatcttacaataccaacactacagattt

SEQ ID NO: 4796 - DNA, 154 bp, Bos taurus
  Clone ID: 20-LIB34-009-Q1-E1-E7
agcagccgctcggtgaggacccgcgaggcctcggcgtcgcgcctcggaacaatgggactcggcgcccgaggtttcctgacgttgctggccctgggggtcgtgctgggggtggcgctgctgaaggtttcacggacagcgcggaccccgagggatc

SEQ ID NO: 4797 - DNA, 374 bp, Bos taurus
  Clone ID: 20-LIB34-010-Q1-E1-E11
aattttcaggcaacatattttatgaagtgttttcataagttatacactttttagaagctacgttgctaattaaaatgcatttatatttaatgcattggtgggtacaatttttttgaactataatcttcattaaagtctatttgtagctgtacattttgtttgtaacttttggcttaaatatgttttctgtttggggtactgaattttttagaggtagtctttcacatttagagcctaatctctttcaaagcaatgttctacattaacgttctacaggtgatgtgttaatattatatatgtcataagaaaatgacttaaatttaagcatgtgactaagtacatcttattacacttgctcaaacgagttaaatctg

SEQ ID NO: 4798 - DNA, 417 bp, Bos taurus
  unsure (408): Clone ID: 20-LIB34-014-Q1-E1-E7
attcaacatttgatctttgggaattattttcatcaggatcttaattgcagctggaaatccaagagaaccccctacccacccatttcccttctcttttctaaatgtgcctttctccggacatccttcccaggtaagaatttcagagcttttagctatgagccagctaaagccagagcttttagctatgagatgagccagttgttgggaaggacaagcagatcaactcaactacgcctgaccctcatcgccatccacatttgtagttagccctcacgcgtactctcaatatagtgccagtggcggcactgaactggtgagattttactttacctttctcatcaaacggtgctggaactgctccagagtccagatttgggtgtctagatgccagtctcctcatgggtctgnaattacgtc

SEQ ID NO: 4799 - DNA, 391 bp, Bos taurus
  Clone ID: 20-LIB34-015-Q1-E1-E7
agacaagtgaggaaggttctggattcactgcatctggattttcaagacaccaattgggaagtcaagagggaatcattgggaatatggcttcaagcacattttgcagtttgctacaaattctgtttgtacgtaatgaaaacgcacactcaggaggccaatttaactgttatggtatacggagcaaatgcagcattttaaaagatctagatttttttagatcataaatgtatccttcttggttatccatcacctggttcctcctattgtgcattatgaccaccacataatacagcctcacgctttcagatttgggttgttcccttgtccaccccatcaacagggatgttttcagtgtttcctagcaaggggaaaaaagaattcaaaccaccga

SEQ ID NO: 4800 - DNA, 143 bp, Bos taurus
  Clone ID: 20-LIB34-024-Q1-E1-E11
tccacccacgcaaccgctgggccgttacactcccgacggccacacatccacacacaagatcctgacaatctttgcatacatatctaccgaacacatcattctcttattcaccccgtattcatcaggtagaaggcatgcatttc

SEQ ID NO: 4801 - DNA, 122 bp, Bos taurus
  Clone ID: 20-LIB34-025-Q1-E1-E7
actcgttggtcgtcgcaattctctatagtgagtcgtattaacttgccatggaatatgaacccacactggaagaatggtgtgctaaagatgatgcacaggcatgctatgtcaacagtgtttga

SEQ ID NO: 4802 - DNA, 407 bp, Bos taurus
  Clone ID: 20-LIB34-026-Q1-E1-E7
gagaactcactggtggtaatttcagataacatacacctggaggcatttaaccatttgtaacattaacatgttattagaactcaattattggattttcttcagtgcaaggctttggttgcggaaatatattgattcatgatccttgagttctctagggaacaaaaattcctctaatgactgttgctcagagtcctacccctttctgagttctatccatctcagtaaaaagaaaactagatgcagatggcctataacacccactaaccattttgtgtactgtgcaaggtatgcctggagtcatagattgtcctcaagcagtagctgctgcaccaactggagaggaaccttgccaggaaactgatgattctacttgaggccaagaatcttctgttgagtctcctgactca

SEQ ID NO: 4803 - DNA, 425 bp, Bos taurus
  Clone ID: 20-LIB34-035-Q1-E1-E7
gaaaaaaatagcagattattagctataattataaaatatattggcttttctttaatttttgatatgaaaagactggatatttcctgcataattttgttatatagaacagcttttagcagactttactaaagttatacaagcacatagttctccatttaatactatatgcccaaaataggggagtaactgcttgggtctgtttggcatcagggcttgtgaggccagaagagcaactctaatcctttgggggtagggagaagaagtttctagggctctggggggaattgcaagtgcctggggactggaggagcctcagcctcgggatggaaaatttggaaatcttagctcaagaagtaccatgtaccagcctcttcagaaagtggcccacaccaccctgaagcaacaaaattgtacgctaactaaag

SEQ ID NO: 4804 - DNA, 379 bp, Bos taurus
  Clone ID: 20-LIB34-046-Q1-E1-E11
gaaggaactgagggtgtgtgtatgtgtgtgcgtgtgagtgcgcgcgcgagtgtgtggacaaggaggtgggggcagccgagttagagtcccaactccttggactccatttgcgattctcttctttcttccccatacctatctggtggtggtgggcgtttatatttgcctttcttttcattcatttccaaatcttttaaaaagttagggttgggggtaatagaaaaagcaggaaaaggtaagggaggagagtagtagcagaagagcaggaggaggacatggagatgaagaagaggattaacctggagttaagggacagagccccggaggaggtaacagaattggtccttgagaattgcctctggtgtcaatggggaaattg

SEQ ID NO: 4805 - DNA, 356 bp, Bos taurus
  Clone ID: 20-LIB34-046-Q1-E1-E7
aacagaatgagttttctgttgttcgacaacatgaggaatttatctggcttcacgattccttcattgaaaatgaagactatgcaggttacattatccctccagcaccaccaagacctgattttgatgcctcaagggagaaactacagaaacttggagaaggagaagggtctatgacaaaggaggaattcacgaagatgaaacaggaattggaagctgagtatttggcaatattcaagaagacggttgcaatgcatgaagtgtttctgtgtcctgtggctgcacatcccatttttgatgaaagatttaaatttcaatgtcctcctggaatataatcaagattttagtgttcgaggaaa

SEQ ID NO: 4806 - DNA, 322 bp, Bos taurus
  Clone ID: 20-LIB34-047-Q1-E1-E7
tctgtcacgactgggtattttagacgcccctcacgccccggatccgccacatccaaggttcaggggtcgtcaattacgttaagatccccttcatccactcgtccgccctcggacgagaatccagactccactgtaggactttacaaaagggggctccggaggtggggtgaccctccacaactggtccaatctgagggaagatacaggccttcccctccgaggctgaccagacattgtcctgtccagcgaggtgctgtgatgttgtggaggccactccctgtggttgagtcccattttcaagcggggactgagttgtgagcta

SEQ ID NO: 4807 - DNA, 208 bp, Bos taurus
  Clone ID: 20-LIB34-059-Q1-E1-E11
ctgcatcctgtaatgtagcattaaagactataaagggtggcaagtttgatttcttaccacttgagtatgactgacatgaacaaatagaaatttgatcaaaatctgtcggtaaatcctcttctttaagccaaaatattatatgaagtgtaacctgctagttccttcattttctgttttttctcacacctgcctttaagatctaataaga

SEQ ID NO: 4808 - DNA, 204 bp, Bos taurus
  unsure (192): Clone ID: 20-LIB34-059-Q1-E1-E7
cgcggtgctggtgatgggcgtgagcggctcggggaaatccaccgtgggcgccctgctggcatctgaggtaacctgtgctaacacctcccagctgcaagtctcatcttgtctcattgcttctggcctgcgtggtttgtaaagtcacctcagatacctccacaaagcttgtgaaaccaccttggagcaattttngtctctttcctt

SEQ ID NO: 4809 - DNA, 198 bp, Bos taurus
  Clone ID: 20-LIB34-065-Q1-E1-E11
gtcaaaagtaggctcactgttctatcaaatgtgtatctatgtaaccgaacgtcacacgacagagatctaaaagtcgaaatgtgcaaattttcaactaatgcaatcctgacatgacaggtattgaagatcatcagtccagcaggttgaattgagatacaacttaagagtacatcacacgacgggttaaatctgccggga

SEQ ID NO: 4810 - DNA, 80 bp, Bos taurus
  Clone ID: 20-LIB34-068-Q1-E1-E7
cacacgtggttctgggacttctctacaaaaaccataaagaaacgttcctggccagccgttgggaactgtcctcggcatcg

SEQ ID NO: 4811 - DNA, 242 bp, Bos taurus
  unsure (217)...(218): unsure at all n locations; Clone ID: 20-LIB34-069-Q1-E1-E11
accgtgcacagttgtcagcactggtgattagggtgtcccacccatagagttgactgaagcacttctttaagaggacttatactagtcctctagctctgagatgagagccaggccattcaaattctgtaactccccgggtccctctgctctctcctgcatgtattcttgcttccccatagctgtgtactactgggtccctccctatgaacaaggctgnntgattgatttttccctctccctga

SEQ ID NO: 4812 - DNA, 348 bp, Bos taurus
  Clone ID: 20-LIB34-071-Q1-E1-E11
gcacacctcaagagtgtcgcgcagtcttatcagcagaggcaccgctgcagcggacgtgttcaaatcatctcagtcctctggcctcctttttttccaagatcatcacggctgttctgcgggcccaggatgatgcgggctgtgctgctccgttgctgtgtcttgatgtccccagtggctgcgttcccaggaaatgcccaggcaggggtcctgaccttctagccatctatctcacaaattgggcatcctttgagcctgctctccaaccatattcttctagcagaatcgtaatccttgccaccatctcctgcatgtgggcccctccttaggccctctgcgtgagtaccgatt

SEQ ID NO: 4813 - DNA, 432 bp, Bos taurus
  Clone ID: 20-LIB34-078-Q1-E1-E11
gtcgtattatgaaactctgagtgcttaagttagtttcttaaggccatattcagtatcagagctagaggctgaactcagaataactgtctccaaagcctttccttgttaatattgctaatgatatggtttctttattacatagatagtggctaaactctttagagttagtgactgaacaatagcaaactctttagaagctattggtataagaaggaagacatgttttcaatagagagcatgtgtatatgtacatggtgagtgagaatgatgaagatgttgaatgaatcctagatgtatgagatattgtctttgccacattaagactagcaaagtactaatgtttatattgttgttcctactgccagcatttgattttcttagtgttatgtgagtgtgctagtaacttctaataagcgttatttaattaaaaag

SEQ ID NO: 4814 - DNA, 414 bp, Bos taurus
  Clone ID: 20-LIB34-083-Q1-E1-E7
aatccgaccacgcgtccggagcttcagcctcagaacatgctacgctgccactctctggagctgctgccactcttgggacatgcatcccatgaagaagcctgaggttagctgtgcagaatggtgcttgttgaatatttgcttatctccatcccctttctccatgctccttatgctccccactcccagctgcatcttataaataccccaagcctctcgcgttgaggaaggtagagctgagatttgttctcttcatttgattgctctgtgaataaatcctacctctaccacaaacctcggcatctcggcatttggctggctgtgcgtcagataaacgaacctggttcagcactttacctttagtgattcagtaagactggctccatcgaatgaactggggagtcttctctcttgtgg

SEQ ID NO: 4815 - DNA, 396 bp, Bos taurus
  Clone ID: 20-LIB34-085-Q1-E1-E11
agcaattttaccaataagactacaactaaatttaagggcaataaaagtttggtacaataggcatgatgtgcacagcaaattgccaaaggaccaaataactcgggttttagtaaagcaccactttgcggaaactggagcgggtgaaactacacattagccaaaccaaacttcactatttcggaaactgaagctgagatttggttttcaatgttgatttttttttttttttacagaaaacatctgaaagccttctaatatgtattaaaccatgatagacagcagatgtatttttacattttttctctttcacataacaattttaacattccaacttttataagattagaattgataaccagctgactgggtgcagtcagggtgaaaatacttgtgatg

SEQ ID NO: 4816 - DNA, 395 bp, Bos taurus
  Clone ID: 21-LIB34-011-Q1-E1-F9
gctcagatactgtttgtgtttgttttatatgaatatttttatggcactaaagagatcttatttaaatttcctttttgcaaaaacttcacggttctgtgatccatggatgtgcattctcagaattgtggtgaaagcaacatggtgtggtcccccagctgccgcccgtagaggcgccgtcacgagctgtgaggtcagtggacgccaagtgacagctgatgaggagtgtgtcacctatttggtcaccaaagctgactcaggcttcctccaccccagatcattctagccatacaagctttctccagagtccctttcaggatcccaggctgaaactggccaccacagctggcaaaagagctgtccgcgccagggccggaccgtctcgttactgtccacag

SEQ ID NO: 4817 - DNA, 372 bp, Bos taurus
  Clone ID: 21-LIB34-013-Q1-E1-F9
cagtgacatagctgatggctctctaacctccaatagggattttttttctgttgaacgcaacccctcttttgtgatagctggtaatttgtgtgaggccagtcgtggggatgtaaaactctcactctagagagtaagaggtataaactattttgtataaaataagctacaagaatatattgtacaacatgaggaatatagctgatattttatagtagctataaatggagtataacctttaacattttaagtcattatattgtacacctacactattatatgtgtagcatataatagagtactgcaactatacttcagttaacaaaaactcactgtgttattcctccaatatgaggaataaaaactaaagctcat

SEQ ID NO: 4818 - DNA, 415 bp, Bos taurus
  Clone ID: 21-LIB34-014-Q1-E1-F1
ggtcgaggacgcgtccgaaaaaaaaagaaatgggcagatggtcgggcttgactgggtagaagtgagcagaaaaacttaagagaaaatcagttcgccttgggaagtctcagatctgtgaccagagttggggaggcttgaaatgatgagaccttttttctcttcgaatcctcaggtctaataagataaagatgcccggaggcagagttcagtggtaagcgctgcagcttggtggatacctaggttctttgtcctatgttctctgggaacctgggctgggtctgcattcccagaatctaggggatccacctggtttcatcagagggccaatctgggtttatttagtccctggcaggtcaatcctgggccatttcctctggtcagtggccacagatgtgtgtgcatttgggagctgagc

SEQ ID NO: 4819 - DNA, 399 bp, Bos taurus
  Clone ID: 21-LIB34-015-Q1-E1-F9
gtccggtacagggtccttagctgagtttggggggcttggggggctaccagagctaccgccgccgccgctgcctccccgtttgatcatttgcaatgtcaggctttgataatttaaacacggatttctaccagacaagttacagcatcgatgaccagtcacagcagtcctacgattatggaggaagtggaggaccctatagcaaacagtatgctggctatgactactcgcaccaaggccggtttgtccccgcagacatgatgcagccacaacagccatacaccgggcagattttccagccaactcagacatatactccaactacacctcagccattctatggaaacaactttgaggatgaaccacctttattagaagaattgggtatcaattttgaccaca

SEQ ID NO: 4820 - DNA, 310 bp, Bos taurus
  Clone ID: 21-LIB34-016-Q1-E1-F1
gccagtgccgctgtcatggcgtctgaggcgctgtctgaggagatcccgccgtggtctctttagagcgaggggcgggcggctgggtatggagagcggccccgagagcctgcaaccgctagaacacggagtggccgccgggccagcgccagggacaggttctccgcaggaagggcaacaagagaccaggctcgccgctggggatggtcctggagtatgggcggcggagagcagcggcgggaaggggcacggggctgcggccggctggaggaccctctcggtctctgcttctcccgggggctctcctcaggtt

SEQ ID NO: 4821 - DNA, 315 bp, Bos taurus
  Clone ID: 21-LIB34-021-Q1-E1-F1
ttgattatgcctcttttaagccatgtaaaagtaattgtaactgacagggacaaacagtacaaattccaagtatgataaagaagagaatgggatttgaaagcaaaaggaattttgagaataacaataggaggaaggaatcatgaacctgttttgttgtttttttttttttagatgcaagtaatttttgaactattctggtaaaactgaacaagaattctcactgatgtaacatgtgaatgaatgaactcacctataattttgtggtttcttgaatatcattgaatatattgaataaatgtgattctcaattgtaaa

SEQ ID NO: 4822 - DNA, 368 bp, Bos taurus
  Clone ID: 21-LIB34-021-Q1-E1-F9
ggtccgaggtagccgggtcgggccacgcgtccgagaaattcagctgaatggcgtgtggctgggccatgtccgccaagaattgaggccttaaatgcccatgctgatgagcagagccacatcttgtgggtcctcatgggtcaagtgcagcgacacatgcacgagatgatggcacaacatcagcggctgagacagatcctgacagagaacacagaggccaagtcatgttttgtcttgatatcttacatttccattgattatagtccccttgataaagctttagacagttacctacgcccagtgattttgtacaacgacttgtacaacattgggtgtgtgtctctgataggaatagttacgatacctcatgg

SEQ ID NO: 4823 - DNA, 291 bp, Bos taurus
  Clone ID: 21-LIB34-024-Q1-E1-F1
tcatgggtcgtcgcaagcctctaggttgagtcataatagctaaatcaaacttggtttgtaatatgtcagcctgtgttgtacatattcccttacatggtatttctattattgacttgatttgagaaacatgtttcttctatggatccatagtgaatttataatcctattttcaatactaattttctgccatggataattctgtgtaaaatcagtgttaatgttaactttgaattctaagagatcctgattgcgttgtatttaagtgcgtttaataattgaatgtgagaatga

SEQ ID NO: 4824 - DNA, 180 bp, Bos taurus
  Clone ID: 21-LIB34-026-Q1-E1-F1
atggtcatgtgatgtaccaaatgttaactgctgtttttaaatgtttaaatcatgccaaacaaatcatgtctgtgccatccagggtttattgtaatcttttactgagtacttggattgggaaaaagggcttgtactatgcactttttattaatgaataaataggaaacattagtaacactc

SEQ ID NO: 4825 - DNA, 411 bp, Bos taurus
  unsure (68): Clone ID: 21-LIB34-027-Q1-E1-F1
cactcggcgggaccggctggcactgcagcttcttgctgcaggatggtgggcggtggcgcgaagcgtanactccgcggagaggggccgcagtgtgaaaaaccggtcgatatgaaggaagagtaagtcctgtgaagctgacgtgcccggtgaccttcgaaaagaggtggaaagccattacaggcttcctctgcctgaagatttctaccacttctggaggttctgcgaaggacttgaccctgaacagccagctgattcactatctgcaagccttggacttcgattagtgggtccttatgatatccttgccggaaaacataagataaagaaaaaatcagcaagcttgaattttaatcttcactggagattttactatgatcctcctgagtttcaagacattaataatggggacag

SEQ ID NO: 4826 - DNA, 194 bp, Bos taurus
  Clone ID: 21-LIB34-037-Q1-E1-F1
ccgggtcacccacgcgtgccaaattagacaaatcatatatttaatttggcggtatgttgaaactttcacagaagacaggtcatgtaatgaattggtgtgtttttaaaagagtggtgtccctcctcccaagacttgaagaaaagacatggtattaattcaacgcgatcacagggtcggtgggtgcaccacagtga

SEQ ID NO: 4827 - DNA, 351 bp, Bos taurus
  Clone ID: 21-LIB34-039-Q1-E1-F1
gctatttgcatcaacttgtacctgacttaacccttggggatgtcgtgtgctaggattgtttaaagattcggtttcaaggggcgagaatcgtgagggctttataacaatacttgaaaactgatgactcgaatacatttctttattttccagtggaggagcttagtgaaaatggtgctacaatcgctgtgcaaagaaattccagagaaaagaatgtaaaagcttggtggtgggtgggtgggttgggattccagcccccttactctcacatcctcatccggtgactgactgacgtgggagatgggaactccagttgtctggggcaaggaagtggagaaattttaaaggtgggtc

SEQ ID NO: 4828 - DNA, 413 bp, Bos taurus
  Clone ID: 21-LIB34-041-Q1-E1-F1
ggaccgctaggcctcggcctcccgcccgcaggcccacgcccgccgcccgcccccggcctgtccaagatggagggcgctccgcgggcgcccctcgctctccggctgctcttcttcgcggccctgccagccaccgggtggctgacgaccggcacccttgagccgccgctcctgccgccagccccgaaggacagcatcagaattaatgtaactaccctggaggatggggaggtgtctaaagaacaggttgttcttaacataacctatgagagtggacaggtatatgtaaatgacttccctgtaaatagtggtgtaacccgaataagctgtcagactttgatagtgaagaatgaaaatctggaaaacttggaggaaaaagagtattttggaattgtcagtgtaaggattttagttca

SEQ ID NO: 4829 - DNA, 407 bp, Bos taurus
  Clone ID: 21-LIB34-042-Q1-E1-F1
atgaaccttaatgatgtggaactgaatttagagtcaatgcttcaaagctctatttcacatttttcaaagctgttaatattaaaaaacattggtttggcattagcaatggtagaatgaacaagactaatcacctgtctttctatttctcaagattatacatgcagttttaatagatccatttttcatctatgcctcttaaaaacttgtatgcttacgtaaacatacttaagaggtcatttttctttaacagatttcatttcttttcttttcatttaaaggtggacaaagctacctccctgagagtaaatacaaaaagaacttatttacacagggacattttaagactgttcttaaagtaaatctgctggccaaagaatgtcaacaagtacgcagtgtgagctagcaat

SEQ ID NO: 4830 - DNA, 273 bp, Bos taurus
  Clone ID: 21-LIB34-044-Q1-E1-F1
aggaagattcactgagacctcgtctcgagtttcgtatatcacataggccaggcaacgacatccttggaatcttatggcattatgaggttaaaccgttgaatcaacacatcaatgctgtcgtgtcagtaccagcgtttactcattagtactttgcaactgtgtaaattttcctcaggcactgtcactctgcgaggtctatgactcaaatcttcaatttcaagagcagatatatcccatgcaggtaatactcgcatcttagccaatcgatgaaag

SEQ ID NO: 4831 - DNA, 141 bp, Bos taurus
  Clone ID: 21-LIB34-050-Q1-E1-F9
cacccacgcctccgaaggtagcgaacagcatcgtggtagacgcgtgagaggcacgagaggccatttagaggtggatcatggattggcacacttgtgtgcaatcgtcaagtatcgagcggccatgatgctactaccaaccaa

SEQ ID NO: 4832 - DNA, 240 bp, Bos taurus
  Clone ID: 21-LIB34-060-Q1-E1-F1
aatgctgttgcatggcatacgcttctcctccgagacttggcagtacctgtgcacgctgcacagactggcccatgctggctaccgggctgtggccattgacctgccatgtctggggcgctccagcgaagcaaatgcacctgcccctattggggagctggtccccagcagcttcttgacagctgtggtggatgccttggatctgggccacccagtcgtgatcagcccatcagtgagtggcat

SEQ ID NO: 4833 - DNA, 315 bp, Bos taurus
  Clone ID: 21-LIB34-060-Q1-E1-F9
cggacgcgtgggctgctgggtacagcaagtgggacggcaggctggaagaggtccccggagggcacttgggacgctggggacggagaccccttttcctgctcttcgctctcgtggtcatcacagtcctgtgggccctcattctcagcgtcctgttttccaaggcgtccaccgagcgcggggcgctgcttgacctccaagacgggctgagcgcaaacgcctccaaacagacggcggtgctgggtatcttggaggaggaggtccgagcgtgcaatagctgctgcctgaggacgcaggcacagctgcagacagtcagca

SEQ ID NO: 4834 - DNA, 421 bp, Bos taurus
  Clone ID: 21-LIB34-061-Q1-E1-F9
ttcccggatgcccccacgggcccgctatgaaacccagcctgttgcattttcttccctagagaagaagtgcgaggttgagagcccgggctctgttcctcacattgaggagaacaggtatctctttcctgaactggagacgagcagctcgagcttcacaggcctgagctgcagaaccaacaagaccctaaacatctaccttctggactccaatctgttctggttgtatgcgggtaaggtgggtgctccgagccgcgcacaggtgaaggagtttgctacaattgttgacgtgaaggaagagtctcactatatcttggatccaaaacaggctcttatgaagttcaccctagagtctttcattcaaaacttcagcgttctctacagtcccctgaaaaggcatcttattggaagtgactctacccag

SEQ ID NO: 4835 - DNA, 210 bp, Bos taurus
  Clone ID: 21-LIB34-062-Q1-E1-F9
agcacacgcactcaaattgagactttctctgcggaatagtcagaagcaggcaacagagaaggaatgtcttccggtaggcttcagcgtcactgacagctgccccaccccgggccgggctcctgcagggcacctgctccacacccgggaaccccactgtaacccgtctgcccctctgccatggatgaggggttatgtttatctttctggctc

SEQ ID NO: 4836 - DNA, 218 bp, Bos taurus
  Clone ID: 21-LIB34-065-Q1-E1-F1
cagttacacacgtaaaagcagatctggagtctgaagtagctaaacggctatgaaactgagaaatacattcatagctgcagaaaccacaataggtagaggacttttggtttttgttttttggttttgaaaagaagagatttttattataaagaaaaacaattccagtgaattgtgcagaaatactggtttttacaccatcctaaaggaaaacttagggt

SEQ ID NO: 4837 - DNA, 237 bp, Bos taurus
  unsure (142): Clone ID: 21-LIB34-067-Q1-E1-F1
gtctcaaaacccttgtcaatgctccttctctgcttttctcgttttgtctcgttattgcctctgggtctgaaggtctgtgggaagtggcgttaaggcttgcttttatttcatttgtactgcaaggtctgtgatctttgttgangggtcccaaggttggaaaacgtaagactttgctctctgcaccctttagaattaggaaatctgccttagccacactagaaaggtccccagggctat

SEQ ID NO: 4838 - DNA, 196 bp, Bos taurus
  unsure (192): Clone ID: 21-LIB34-068-Q1-E1-F9
cggacgcgtgggcgcgggccctgcggcccgggccgggcgcgcgctgggtgccctgcgcccggctctcctgccaccccggaggcgctcttgccggggagggctgggggttcccgaggcgcccgcgggcggagggtgaggggaaggaaggaggatttgcaacaatacctcggggaggaggcggccggggcagcngcgg

SEQ ID NO: 4839 - DNA, 190 bp, Bos taurus
  Clone ID: 21-LIB34-069-Q1-E1-F1
aaaactacagcgacacgcaaaccgtcaacacaaccgtgaagtcacagcccgatagcagcaccctggtccctgttctgcatgctcaaatcctatagattcctgtccaggcaccagttctcaaccctgagacaaaggtctcaccatctgggcggtggagactcagaacctgaggatggggaccaagtgacca

SEQ ID NO: 4840 - DNA, 241 bp, Bos taurus
  Clone ID: 21-LIB34-070-Q1-E1-F9
gttggatgaatgtccgaaaagtgatgactgtaaaagaaaattttatatttacatagtagtgcaaatacttacccttttttctgctgcattaggaagcacctcaaatatcatgctgatttttaaaaatgttgaacctgaactgaaatcacttgccatgggtttccattcactaactattcgaacgctaggaggaatttccagctcctatatattttggagcctcctgatttgatagaagctt

SEQ ID NO: 4841 - DNA, 385 bp, Bos taurus
  Clone ID: 21-LIB34-072-Q1-E1-F1
ggagcccaaccttcctgttcctctccaagcctcgacctgcagaagacaaaaagggaacaacttgagcccctgactcccggaggctgccttcggcaaaatggcccccgactgagccccagaccccacagctgccaccgggcgtaaccaggggcaccacgtgaccaaaccgatcgcttccatggtgatgtacccagcgcggacctcttgacccggaaatcaacctgccgtgatgcatgcagggtcatgtagtccacgtcagaaattcgggctacgcagaatggctcgggaaaaggaagtgagaacgttgcgaacgtaaggaacgtatctggaatggagaacgcgaggaacagataaagcattaagcggaagtgacgctctccttgct

SEQ ID NO: 4842 - DNA, 80 bp, Bos taurus
  Clone ID: 21-LIB34-073-Q1-E1-F1
agttctagatagcgagcggtcgcgcatttctgcctggtcctgagtttggtgggtgtaggagccacatcagtaggtagaga

SEQ ID NO: 4843 - DNA, 364 bp, Bos taurus
  Clone ID: 21-LIB34-075-Q1-E1-F9
gacccacgcgtcagattatatgctacatatgtaatcattaatttgatataaaattgaaaatgtttttttttttaaaaagccattgttttactacattagagttaaaattattcctttcattctaagatacaagggcaatgattattcaaaggttttcttatatactagggcagtcagactaatttgattctgatttcttctggtcctaaagtgtttgaattttatttctaccataaccctttagtgtgtatatgtatatatatacacacacacacatacacaatatagtgttcttttgtcacctgctctacttcattctctacaaatcagtacttactggttgcttttgaataatgattttggg

SEQ ID NO: 4844 - DNA, 239 bp, Bos taurus
  Clone ID: 21-LIB34-076-Q1-E1-F1
accacgcgtccggaacagtgctttaaacggtttggcctctccaaaacagacacacgtagttcccacccatacatggcttatattccaaaggtttttagtcaacttttgggactcggggcacatttttccacaggaacagtagtaattaggttccctgtgaacactcccatagagagctcacccaggaacctaatccacttaaccatgaatgtactgaacttgttatgtggttgacaaat

SEQ ID NO: 4845 - DNA, 393 bp, Bos taurus
  unsure (306),(312): unsure at all n locations; Clone ID: 21-LIB34-078-Q1-E1-F1
gtcgaactacctctgggtgtccctgtttgctgctgtcagggcacagtcctcaggatgttccaccagggggaatagaagccggaaccagagcctctaagcctgtccccccagtgatggggcccccaatgagtcatctgctggctggcctgtgtgtgtgggtggccttgggccaggtggagggctcagccccctacctgggccctgctgagcaagaacagaaccattacctcgcccagctgtttggtctgtatggggaaaatgggacgctgactgcagcgggcctagccaggctcctccacagcctgngactangccgagttcaggcccttcgcctgggacaccacgggcctcctgctggtccgggtgcgccccagcgggagacattccacacac

SEQ ID NO: 4846 - DNA, 342 bp, Bos taurus
  Clone ID: 22-LIB34-003-Q1-E1-F5
caggcgggattcctcaacgctcttaaggacagtcctgcaagcgtgctggaggccgtggtctgcttcttctctgtctggtccattgtggggctctcgggtttccacacgtacctgataagctccaaccagaccacgaatgaagacattaaaggatcttggtcaaataaaagaggtaaagaaaattacaactcctacagctacggaaacatctttacaaactgctgcgttgcactgtgtggaccaatccctccaagcctcatcgaccgaagaaggtacattcatcccgacaccccgcagccagccgcaccctccaacgggatggccacatacggaggaacacag

SEQ ID NO: 4847 - DNA, 410 bp, Bos taurus
  Clone ID: 22-LIB34-009-Q1-E1-F5
agagccgtggcctctctccctctcaggttacaattcccaggaaagatattttctggggcttcaccatctgggggctccaccaaacgtaagtctcagactggaaagactgagactttcctgtgaagggtggctctccccaaattcatccttggagatgttgtcttccaggggtctcccgtctgacccctgctcctgagagatggctcaggcgtctccgggtgaacccagctccagggcagggagagcttctgggcacttctggccgtggatggtttcctttactttcttccaggcttgtgggtgctaaagtccattctgacagttctgttcctctttctgaggttttctgcagcatcctccgggagacctcgggccatccctggctctcaacttgtcgcgtactcatcgct

SEQ ID NO: 4848 - DNA, 347 bp, Bos taurus
  Clone ID: 22-LIB34-010-Q1-E2-F5
agagaacacagggaggaccaggattgtccatcttccatggagcccacccactcatgggttcatttcagcatactttaaagaatacttgcctttagaggttcctgggcgtatcagaagagatttctgctccttggcgtttttaagtccacagtcccttgtcatcccgcagagaaggctgatagtggggacagcgggcttggctaacaggtgggtcagtgggccgtggatgctgattggccagagccagcgctgtggtggtggtggtggtggtggtggtggtggtggtggtggttggggaagggggaatcagctccaatccttgagttacagcttgctctcttacgatg

SEQ ID NO: 4849 - DNA, 351 bp, Bos taurus
  Clone ID: 22-LIB34-013-Q1-E1-F5
cccatgcgaccgattcagtatactgattgtcagtcactgaaaaggaaatcatactgaaattttatcacaaccttgtttcagatcaacgagaactgattcatgatttaacatcattcaaaagcccagatgcaaagctgtttgaacaaagagaagttacatactcatcaatatcaaagacaattagcttttctgcccacattgggcaggatgcacttaatatggtatattcatgttttggagtatgtagacatagttcccgtaattcacctcatgaacgacaaagtaatatacatgtgtaacccatggaagctgctcttaagatctgtaagcgttcatattgcaggagtgctt

SEQ ID NO: 4850 - DNA, 409 bp, Bos taurus
  Clone ID: 22-LIB34-017-Q1-E1-F5
gggtcatcttgtcctgttggaatttgctatgcagagccttaaacttcccattttgttaggatcagctaggccagtaggaatggaccaggaccttgtctcacactgatgatacctcagatgttggctggctatgtgaactgcctatttcctgtgccgagctgtttttgatttttaaataaatgaaaatctgtagattctctcctcccctgtcccaaaaaacaaagcaaaataatgctttttgaaattgtctctaggattttaaagtgaaaaaatgatggtactatccaaagttctttatttcagaatctgacagtggattcctttaacataggctcaagatcaaaacagcataccctctaagctcagacagactgttgactccaagggttttgatcaataccataacaaa

SEQ ID NO: 4851 - DNA, 356 bp, Bos taurus
  Clone ID: 22-LIB34-020-Q1-E2-F5
atacaagatagcgatgacgagcattgtcaaacttccatggatcccacccactcatgcgatcatttcagcatacttaatacaatggctaccttcaaacgttcctgagcttaccagaaaagatttctgctccttggcgtttttaagtccacaatcgcttgtcatcccacaaatacggctgaaagtgcggacagcgggcttggctaacaggtgggtcagtgggccgtggatgctgactggccagaaccagcgctgtggtggtggtggtggtggtagtggtggtggaggtagtcgttgaggacgggggagtcagctacagacctttagtgagagcttgcgctcttaccagatcagggttt

SEQ ID NO: 4852 - DNA, 52 bp, Bos taurus
  Clone ID: 22-LIB34-024-Q1-E1-F5
tcgtaggtcgacacaagcctctagactgagtcgtactacggctgagccctag

SEQ ID NO: 4853 - DNA, 376 bp, Bos taurus
  Clone ID: 22-LIB34-031-Q1-E1-F5
gagtgatactgttagctgcctatagccgtgagctgatgatgacgaagcgttggctggcccaaggctctgttatcagacacattcttcaaggaactgatctcttacgtgagcacgaagggtcagcaaaagtcaatacctgtatttaagaaccatccaagcaaatcactggtcctaagatttgttagagtgtagtttttattacactgtaataacttacagtgggaagaaccaatacgggtttaggtccctcataatcacgttttctgtccaaataagtcattgattgcggtgactgggggggcctctgcccatgacaattcctggccaagtctcacagccgcccccctgcaatggattcagcagggtggtcgccgtg

SEQ ID NO: 4854 - DNA, 51 bp, Bos taurus
  Clone ID: 22-LIB34-036-Q1-E1-F5
accgcccctcccctcccctctgtaaacaaaactcctaagagttggatgctc

SEQ ID NO: 4855 - DNA, 315 bp, Bos taurus
  Clone ID: 22-LIB34-038-Q1-E1-F5
cggacgcgtgggcaaggggaagggcaggcgaatcctttactatggctggaagaggaggtcttttgatgctggaaaacttcataggtggaaaatttttaccttgtagctcagacctagattcctatgatccctccacaggggaagtgtactgccatgtgccatacagtgggaaagaagaggtcgaagccgcggtggaggctgccagagcagcttttccgggctggtcctcccggagcccccaggagcgctcacaggtgctgcagcggctggcggagttgctggaacagtcgctggaggagctggcccaggctgagt

SEQ ID NO: 4856 - DNA, 110 bp, Bos taurus
  Clone ID: 22-LIB34-058-Q1-E1-F5
agagacctgccccctgcagtgcaccagcactgatcgacctcgggcgcgtgtccggtcgcatcacgtgccgcaagcgaggagcaccgccagggcgccatcgaggagcatgg

SEQ ID NO: 4857 - DNA, 207 bp, Bos taurus
  Clone ID: 22-LIB34-059-Q1-E1-F9
caactgtgggcttgctggtggatgccctccctatgccccaatatattcttcttggatagattgctggtgcatgctacagaaagagggaaatatgagccgaggaaatagcttgtttttccggaaggtcccctttgggaagacctactgttgtgacctgagaatgttgatttgaagatgtggggcagggacagtgacatttctatagtc

SEQ ID NO: 4858 - DNA, 288 bp, Bos taurus
  Clone ID: 22-LIB34-063-Q1-E1-F5
cccggggccaccaaggcgtcggtacaacccaattggaatggcaaccccaggaaggaaagaacccaagctcccaaccaacaagaaaatggataaagaatggaagaattgactggtggataaaccccccaattagaacaacaaaattggccaagaaaaataagttaatccggaggaaaccggtggaaattgaaatggcccccccaacaaattccaagtggacaaaacttttggcgaaaccggtaaaaaaacccccaaaggtgaatccaaaaatccccttcaacaaaagga

SEQ ID NO: 4859 - DNA, 175 bp, Bos taurus
  Clone ID: 22-LIB34-063-Q1-E1-F9
ggaaaatttaaaggctttaacacggccaatgaattataattacaggttttttaaatcccctggcttttccaaggattcaacaaaatttggaaatttgattccgggtcccccggcaatttcgaaaccaacctggtaaaccgggaattccccggtcaactactggcaaaacccaacc

SEQ ID NO: 4860 - DNA, 210 bp, Bos taurus
  Clone ID: 22-LIB34-065-Q1-E1-F5
acaacctctatcatcagactcgacgctcgcggtccagacataatatcccaaaggacccttccgaaactagccctgatgttttaagatgctctggcggacaaagtatcgtgcatggggaacagcaccgaagactttactgccacgattaagtgtccctgtaacgacctctgtacctacgaccacacccgtagtaccgtcatcgtttctcaa

SEQ ID NO: 4861 - DNA, 238 bp, Bos taurus
  Clone ID: 22-LIB34-069-Q1-E1-F9
acgctcggaggcctcaacaaaggatttacagcaactttgggacgtcatggagttttcaatatggtttattttggcttctacttcaatgtcaaaaacattattcctgtcaataaggatccaaccttggagtttttgagaaaatttgggattggtcttctctcaggcacaatagcctcagtcattaacatccctttttgatgttgccaaaagtaggattcaaggggcctcagccaagttc

SEQ ID NO: 4862 - DNA, 406 bp, Bos taurus
  Clone ID: 22-LIB34-072-Q1-E1-F5
agggaaatccatggtcaaaagatcaatatgcaaagatctggggaatcacgctcaacggcaaagaaactgctagcaaataatacattgtcaacgttaaattgatacttgaaaagtttctacaatgcctaaaactgcaaagtgtgaggaacgaaaatagcacaattgttttgcgttgctacaagaaggagaacactgaaaagttaactgaaacctgtgtatcaatctcatgaaagaatgttacggacttgcaacagcagattaacatcgttcactccattgcaaccttcataaatgatttatctgaacgtgtgcattgttcaaggactattttcagaaaatactttcagtacccaaattgtaggcttatacagtattttgagatatggtacacgcatagatgccatca

SEQ ID NO: 4863 - DNA, 345 bp, Bos taurus
  Clone ID: 22-LIB34-075-Q1-E1-F5
cccacgcgtccgaatttggacatttcatttctagagacaattatcgacatcagactttagttcagtacacttaggtgtgccgtaacagtctttctttcacaattaaattgttgtcagtcaacgtttatgaattttacttagagaggcctccctaggtaactgttcttcatgagagccatcacttattagtgccttagttttggtgggccacggttatctacgtgcttcattgcagttaatattgtatactgctgattaatgatgatcaacgtagataaaattgctgctctgtcatttgaactctttctaaatatcctttacatacagtattgtcgtttttaagca

SEQ ID NO: 4864 - DNA, 410 bp, Bos taurus
  Clone ID: 22-LIB34-076-Q1-E1-F9
cgacacacacgtcaacaatttatcatatgacagatctgacattagattcattccattaaaatttttttcatttgttttattcttccattctttttttttttgactgtgccaggtcttacttgtggggtcttcattacagcacacaaggtctagttcccttaccagggactgaacctgggcctcatgcagtgtgagtgtggggatcttaaccactagactaccagggaagtcccaaatccattccatttgagttgaaaatttgtgctttgttgcactatactgtaatatatcccaatgagtgcctgaagtatgtatacattttcagcatgagtttaaaatgtcaagcataaatgtatataattcagttatctcttatgtgatcactcattcattcattgattcatcaaaca

SEQ ID NO: 4865 - DNA, 387 bp, Bos taurus
  Clone ID: 22-LIB34-079-Q1-E1-F9
gttccttatgatagagaacatatgagaaatcgttcagtcaggaaggctggagccgggcggagaggctgggcgcccccgggggctccgcctggcccccgccgccctcgtccccgcgctgtggtaggggtgctgctgcttctgtgggaccgacggtttcctcaaacgcaggaaacgattagtgggcggaccggatgggcggcggaggcgcggcccgctgctctgccgggtttccgaacctgcggcgcctactccccctgcgagggcgggccgccgggactcagggaggaccctcggggtggggcggggccctcgcgctgggaagaagagtcctcgtctgcctccatcgggagcagcattctttgacatctagcctgggtacctctgtgt

SEQ ID NO: 4866 - DNA, 163 bp, Bos taurus
  Clone ID: 23-LIB34-006-Q1-E1-F11
acccacgcgtccgattttttctgtttttattgtttatattctgctctctcacgcatacattttgatatttataatgtctttcctccgtgtctctggggatcctgttggttgggctctgctccatggtccactgcctcccatagaaggggaccccacgaaaaca

SEQ ID NO: 4867 - DNA, 418 bp, Bos taurus
  Clone ID: 23-LIB34-006-Q1-E1-F3
gacagctaggacaaaagagcatacgcgtgaatctttctttctttcttactaatttaatttgctaaaaaaaaaaatcactcagtaagacggttcatacaagttattattgttggaaatttggtttgttttcctcaaagtcactgacttcaagtagttcatttctgttttttaaaaaaaggtgtttgctatgtgggaaaatcaatcactgccaggattctctcatttctgtactgttttatagaattgaattttaacttttctcacaccagcaagtattttacaggtgccttggattaaaacaaagtcgattttacaattttactgtaaatctttgtgcttctgccactttaaaaaagaaatgcaattgtatgatggttaatactcttagttaatccgccttttgcgttctgagtgtttg

SEQ ID NO: 4868 - DNA, 361 bp, Bos taurus
  Clone ID: 23-LIB34-011-Q1-E1-F11
cgcgtccgcattatcatttaatactcttctgatattgtatatttcaattcctaaactggtagttacttggaattttgcaaacatttttttaaaacatgaaattggaatttcatatgagtgaacaagagaaagcttcaaattatatcatgtggattcctgatttaccagtttttgaagatctcaaaacaatttatgttatagaaatatttcagtagtgatataaaaggataactggtaatatatactacattcaatgaggttttctttacaatgcgctatcgagtcgataaggggtggcataacgcataatacatcaactcaactaacattttttttagaggtgtataagcatggcacaagg

SEQ ID NO: 4869 - DNA, 423 bp, Bos taurus
  unsure (384): Clone ID: 23-LIB34-015-Q1-E1-F3
gttgagaaatacttgtgatatccgtggtgagcggtttatatcctatgcaggccttttgttcagttccacaacaattctgcaaatttatgacccttgccagagaaaaagatcaatacctcagtgatgatggagagaactaagtaaactccctgctgacctaaaagtatcacttgcaaatatgagaacaagatcacacccagttctaaaaacttgaaaggattgacaaaagatcagtgaacagtttacccaaattttgaatctctccgcgtaaagactcactagaaattgacagtttcatctactcccagttctgtctttgaggtcaagtggttatcaactcataactgaaaattaacaatagtttgagtctcatttaggtattanttgaaaattttaaatggcccgaaaaattccaatttccca

SEQ ID NO: 4870 - DNA, 377 bp, Bos taurus
  Clone ID: 23-LIB34-018-Q1-E1-F3
acccaggcgtcaatttttttttggctttttaatggaagttcatttatctgtggttccccccactccctttcagagtttggagcctcttccagccagtggacctgatttcggagcattaggagaagaagctgaatttgttgaagttgaacctgaagctaagcaggaaattcttgagaacaaggatgtacgtatcccgtggagggcgagggctccatactgttgttgctagaagcactcgcgtccagaaagcgctgggaaaacagacgggttaatcttgtgtgaagcttaagcaaagaagagtttgcagccagctacattttagaaagactggacgctgaagcgaagtagcttcgggttttagaggaggagttttttcg

SEQ ID NO: 4871 - DNA, 391 bp, Bos taurus
  Clone ID: 23-LIB34-023-Q1-E1-F3
gcaagcctctagagtgagtcgtattaggcgcggcgcaaagagtctccgcggaacagcccggctgcgcgccgccggcggagcgagccgcgcccatgcctgggggctacagagtgatgggggacgacggggccatggactacagcgtccactaggcctggaatgaagccaccaaggtgtacctggtggtgatactcgtcagcttcgggctcttcatgtgtgccaggacgaatacagcgatgaattatgacgatattcagtttgccacctccagcagaagctctgtcatagcccatcttttatgacacgcatgagcaaaattcgtttaacacagcagctagacatgtactccatttccaggaagtatgactacgagcagccagagagcagggct

SEQ ID NO: 4872 - DNA, 215 bp, Bos taurus
  Clone ID: 23-LIB34-029-Q1-E1-F11
attaaaatccaccattatcctcagatcttattttattccagaacttcacaatttgtcttatttaaattatgacccaacagattttaatttcaccatttctatgaggctgatgctagtaaaaattaaatcacacagaataagattttgaaaagggagatgcagaacatcttaataattcacaaactacaataaataggattggaaagaaaaagaaa

SEQ ID NO: 4873 - DNA, 80 bp, Bos taurus
  Clone ID: 23-LIB34-033-Q1-E1-F3
actagttctagatcgcgagcggccgcccttttcattttcttgctatatttttttttgttctgtgcatttgttatctgttt

SEQ ID NO: 4874 - DNA, 148 bp, Bos taurus
  Clone ID: 23-LIB34-038-Q1-E1-F3
aattattgatgagacaacgttgtcagccatgatctttctcttgctgacccacatgcagtcacataccaaacctgtgagtttgaggatatagtagattctgttcctcagagcggatcagtccgtgatccttgtctgatggtgtcccacc

SEQ ID NO: 4875 - DNA, 395 bp, Bos taurus
  Clone ID: 23-LIB34-043-Q1-E1-F11
atgaaaattctggaaagtgccactgcctagtgggaattaaagggatgtgtcctagaactggagcttagggaggagagtgaacagtcagactgactacctaccccccacgcaggtttctgagtggatgcaggcagcaccccagtgccccccaaattctatcattagggactgctttttgtgagagaggcaggaagggtattgggatgggatgtccaagaacaatcaccacatctgcagtgctgtcagagctggggtttccccttccaccaagccaagtcctcagtcccaggaaaggttgttccttgctcagggcagcccagcctccctcagccacccctcattcctggggcgttcccccaaaaaccccagccagagtgctcagatgggtcctgggc

SEQ ID NO: 4876 - DNA, 365 bp, Bos taurus
  Clone ID: 23-LIB34-045-Q1-E1-F11
gcgcgcatacctgcgaacccggcaagctgcgcggagttcggagctcctgggcgccctggcccttgtggccagggagcgcctcacgaggtaaggcgctcgcctggccggctcctggagtgcccctgctcctgccttctcgcgcccgccctagctctgaattcagcctcgtcacacccgctcctcagagccgatggcacagtccaggcccgggtcggcgacgaggagtcacgctaaaagcagcgcctggggtttgcttttttatttgcgtgtcattatcagtaacagatgtctactacttgtaatatgcagcacaacaaaatgagtccatgggaacggttgctaggctgtgagttaacagcagccta

SEQ ID NO: 4877 - DNA, 404 bp, Bos taurus
  Clone ID: 23-LIB34-045-Q1-E1-F3
cagtgaattacataaacacataatgcattcaagtatagatatgtgtgtttatattcagaccattttgcctttgagaagcattttctgtgatatgaaaagctgggtttttttcttttttgggggaactgtttcacatttgtgagtgctgatagtgcatagaactatgcaaaagaatttaaaagtagcagaatgaactggcaaataaggtatatattgcttatatttgcagtacagaatgcagcatgtggtgtcactgctgcgtaacacgtttatcaggtgtcaatagcaattcttagctctaagtgtatgcctgatttgagcttttaaaactctgcaataggggtgttataacgtatccactatccatgttagtaatacaggatacagagacgttgttttttaac

SEQ ID NO: 4878 - DNA, 405 bp, Bos taurus
  Clone ID: 23-LIB34-047-Q1-E1-F11
agaccaggtgaataagggtcctggccagcaccgatatccccgcctgcccacgaaccctgtctctcgggcactgtccactgccttcggctggttgttgaaaccaaccctaaacgggatccaacctgtcggacgcggtatgacgtgcctctcaagacctgtctcacctctccggaagattgagtcgtcgcaaaactgaaagctggatctcctggtcccagcgatgtctctctggtaaacagcccctgctgagcctccagagctccccattactgatgatgctgctggtcaagatgatgctggtcagaccaccaatgaccaatttcaagatgactgtcacagctgactgtgctattcctgcatgtagccccttcgctccatctataaccactcttgctcactgattaa

SEQ ID NO: 4879 - DNA, 433 bp, Bos taurus
  unsure (405): Clone ID: 23-LIB34-049-Q1-E1-F3
acagaacctcttcatggcagttgaagatcactttgaattgtgtttggctaaatgcagaacctcatcccagagcgtgcagcacgagaacacctatagggatcccatagcaaagtactgctacggagagagccctcccgagctcttccccgcgtgacgctgtgggggactcggccctctgggaggatgtgctgctgaagaacttgcagcctgaagcttttctctggtcttcaagagaagacttgattatgaccacttcttgtgctgtgctctgtggcctcactcgcccccgggctgaccagatggacttgctccgtaaagcagttggaaacgccagcgggttgaattcgagaaagacagaacggcgggtgacctggcggaagcatcggcgctctgggcgcctcagcnctgcggctgcttgggaacctgtgggccc

SEQ ID NO: 4880 - DNA, 331 bp, Bos taurus
  Clone ID: 23-LIB34-050-Q1-E1-F11
tcccggatccacccacgggcccggattgttttaagctttcagccctttgtattttggttgaatcatcccctacaagtgccatgtataaattgagcagttagagttcgtggaacatggaagaatcctgaatgagcatgataatcggtgctcagtgatcaaatgctgtttatgtaacaatcccttaggaagaggaatcttattagggtttggtttgtgatgtaactgtaaagataaaaggtatatttaatatgtggcaagaggaaaccagtcttgtgactttatcatagcttttctatgaaaatccaacttccttgggttttccagttccata

SEQ ID NO: 4881 - DNA, 221 bp, Bos taurus
  Clone ID: 23-LIB34-057-Q1-E1-F3
ggcgacaggggttctggtgctgtctgttcaggacggagaccaagagatctccagagagacttccttgaaaggacttggcaggtttgaacatgcattgggggcggcaactccaggcactttgcatcctatggaggtctcagatgtccaatcacactatccgcattcatactaggcaactggcatcgctgcagtggggacaccaggaagttcctgccaaattt

SEQ ID NO: 4882 - DNA, 226 bp, Bos taurus
  Clone ID: 23-LIB34-058-Q1-E1-F3
gccttcactcgccagccgcctcgcgcagctccccaggcgtgcgcctagagttctgggagcctcctttgctgctgaaggagagacccctgccctctccggggcagcctccctgctccacgtgggcagggtgttctgtggcagcaggtatggcaggcgtggagcagcgcgagggcgccatccaggtgcagggccagagcctcttcttccgagaggctctccctggcgg

SEQ ID NO: 4883 - DNA, 229 bp, Bos taurus
  Clone ID: 23-LIB34-062-Q1-E1-F11
ggtcgacccaagcatccgggcgcggcgattggcgtccgggccgcgcggttcgggggctgccgggaagatggaggactcagtgtgccccctgatgaggaggccacggggggagcccggctcccgggccccgagaccgactgagggagtcacctttgcgaagcctggggagtcatgcgagaaggcttgggcatggagactgaagccacttgtccaaggtcacgcagctgcc

SEQ ID NO: 4884 - DNA, 463 bp, Bos taurus
  unsure (91),(120): unsure at all n locations; Clone ID: 23-LIB34-064-Q1-E1-F11
aacccacccttcgaggcacaacaataacttggacccaactgccctggtcccaaaaaacttcccttttggggttggaacccctctaattacnttgaatgctttttagaccacaaacaccanaaaacagaacttagaagaagatatccaaaaaaaacttgtcactttattgtacacttgaaactaatataatatttttaaccaactatacttcagtttaaaaaaatttttttaattaattaatgaattaaaaagagagagaaaatagagcatataaagttcctggggggagaaaagaagacattcaaaagccttctctatactttgataatcagcctcaccttttttgaggggtgctgtgtttacttcatcttcctactttctagaaagttaaggccctctagttattcatgattccctcatcagctctagttaaagttaagtagatagtagaaaaagattttag

SEQ ID NO: 4885 - DNA, 239 bp, Bos taurus
  Clone ID: 23-LIB34-067-Q1-E1-F3
atgaaaaagaaggatccttgccctcagctcatcaggagactgcacgtcagtgacaagccacggatggagtgacaagaacagtccttggagcccagccagcagatgtcaggctcagtgggtccaaggaccactcctctccatcgagtgggtcagcatagagccaagatgagtttacatgtgccctggagagccatgggctagaggggttgatggcactttcctattggtcttggttttca

SEQ ID NO: 4886 - DNA, 133 bp, Bos taurus
  Clone ID: 23-LIB34-068-Q1-E1-F3
tggaccacagcggctcgcgggagctgtgtgcggcccacccggtgggtccaggaagctgtcagaaagtgataatccacaggagcacggccacaagatgccccaacctggccaactttgccttcagcatatacca

SEQ ID NO: 4887 - DNA, 401 bp, Bos taurus
  Clone ID: 23-LIB34-072-Q1-E1-F11
acggacacgtggggacagacatggcttccctgtcccctcttcttgtctccatccagctgggaagtcctccagtccccagggggaggccagctccttgggggaggtgtttgactttgaactgactccagaagacatgaaggcgattgatggcatcaacagaaatatgagatattatgaatttctaccctcagtgacttgcacgtgtttcacacatacactgttttctgtagccggcaggtcagcaggggaactaagctttgtaaaagtttaattctaggaagccagttctgatttccagcttaagaatctaccaggggttttctacagacctcagaccagaggtttcctccagggctccatttctcaccaacagatatgtgataggggctcacgacagccta

SEQ ID NO: 4888 - DNA, 410 bp, Bos taurus
  Clone ID: 23-LIB34-072-Q1-E1-F3
caggctccgggccgatccgggcgccgagacccgcaccctgatcgctcacctccggctcccggcccaccgcctccgcccatgccgacgcccgccgcctgccaggtgcgccctcgcccgagggccagctaagcgccggccggctgcggcggcgaaaggtgggcccggccccggcgctgccctcgacagcggcaagtttgggagttgcactagtttgcggggtaggggagaggctgggcgggggggccatggaggaggaccgggggtcggcgctggcggccgagtcggcgctggagaagaacgtggcggagctgacggtcatggacgtgtacgacatcgcgtcgctcgtgggccacgagttcgagcgggtcatcgaccagcacggctgcgaggccatcgcgcgcctcatgccc

SEQ ID NO: 4889 - DNA, 187 bp, Bos taurus
  unsure (114): Clone ID: 23-LIB34-073-Q1-E1-F3
cgaaatgtatgcaccttacagacgtggcactgacatcacactccatgcttcaacgctctacatcagattcttcatagctgttaatattctcaaccattggcttggcaataccantggtactgtgatcagcactgctcacgtgtcattcgatgtcacagtattatgcatgaacatcgactacatccag

SEQ ID NO: 4890 - DNA, 442 bp, Bos taurus
  unsure (401): Clone ID: 23-LIB34-074-Q1-E1-F3
gggccgaggcacgcgtccagttgaaagaatcaactgaaaagctacagttttcttctgaatgtttatattttattatgtattgttgtgtattttaggaaaaatgggaaacaaaagatttccagagtgccttaacacgttaacacacaaatccatcttattgggttttacaatgccattgagtcctgttgagttttgctcatgtggttttgtccccaccattatggaactgtgttgtatttgaaatggaaattattctgcagactttgtttcttttttgattatgcctcttttaagccatgtaaaagtaattgtaactgacagggacaaacagtacaaattccaagtatgataaagaagagaatgggatttgaaagcaaaaggaattttgagaataacaatangaggaaggaatcatgaacctgttttgttgtttttttttttt

SEQ ID NO: 4891 - DNA, 243 bp, Bos taurus
  Clone ID: 23-LIB34-076-Q1-E1-F3
gggaagacccacgcgtccgcgaaaattcgtcacaaggtgtaatctcagagtgatctcagtaatttcgcttaacgtgtgtgtaattgaccggtggaacatgtcctttttactggatctgtactctgggccatcatgcaaaactcttctccaaaggaacaaaggaagcttttgggtttttaaattctaaagatgtatgtataacaagcctgcttttacctcctgcaatggtcaacattttacagt

SEQ ID NO: 4892 - DNA, 407 bp, Bos taurus
  Clone ID: 23-LIB34-081-Q1-E1-F11
gtgctgtggtcagtgcaatgcccaaagccaagggaaagactcggaggcagaagttcggttataatgttaaccggaagcgtctgaaccggaatgctcgacggaaggcagcgccgcggatcgaatgctcacacatccgacatgcctgggaccagaccaaatcggtgcggcagaacctggccgagatgggtttggctatggaccccaacagggcagtgccccttcttaagagaaaggtaaaagccatggaagtggatgtagaagagaggcctaaggagcttgtgcggaagccttatgtgcttaatgacctggaggcagaagccagccttccggaaaagaaaggaaatacactgtcacgagatctcattgactatgttcgctacatggtggagaaccatggggaaaactat

SEQ ID NO: 4893 - DNA, 393 bp, Bos taurus
  Clone ID: 23-LIB34-084-Q1-E1-F3
aatttattttttaacatgtgaagtcatccagtgaccctagtttattgtgaaaacatttatttatgaaaattcacattggaagtagaacatctaaaatagctctataaatatcaatcaaacaagttttaaaaagatgtcttttttctgctcacatagttaagtagttaaataatcatgacataaatttagaagtagaataattatatagtagcattccctaaaatatttctgttaactggcatgtattgactaactataaatcaagtaggaaaggtcctcctccaattcaatataattcacatcaatctcttcctccggtgtcaagaacaaatttctgtaccttaaacttccgtttgttgagatgggtaaaatgtcaacataataagctacata

SEQ ID NO: 4894 - DNA, 364 bp, Bos taurus
  Clone ID: 23-LIB34-086-Q1-E1-F11
acaatgttgataacgtaagccagtttctgcaaacttcttagaacactaagtagatagcaaaatcagtaggtttgactgtggtcaaccaactcagagcagcaccgtgtctctattcttggtgctttcagtcctttttctcggccagcagacagatggcgtgaagttatgtgcaagcgcgtgtgcctccccggcactaccgccatgatgtagccagcctttcccgagttggtcttcctgcttccaccgagctaatctacagacttgcctacaatgcaccagcaagaactgcctggtgaaacccatgcccgagcacgccactcctgtgctcaaaacctccgatcacctcagaggaaaaagctgagtg

SEQ ID NO: 4895 - DNA, 414 bp, Bos taurus
  Clone ID: 24-LIB34-008-Q1-E1-F7
gagacgcccctccaagaagaagcggctttggaaaccgtactatacgctgacctgggaggagaagaaaaagttcgatgaaaaacagagcctgcgagcttcgaggattcgagccgagatgttcgccaagggccagccagttgctccctataacaccacgcagttcctcatggatgaccacgaccaggaggagccggatcttaaaaccggcctctatcccaaacgggccgctgccaaatccgacgacaccagcgatgaggactttatggaagaagcgggcgaggaggatgggggcagcgacgggatgggaggagacggcagcgagtttctgcagcgggacttctcggagaactatgagcggtaccacgcggagagcctgcagaacatgagcaagcaggagctcatcaaagagtacct

SEQ ID NO: 4896 - DNA, 146 bp, Bos taurus
  Clone ID: 24-LIB34-013-Q1-E1-F7
cccatgcgaccgaaaaggctaaccgatttagctctacccgtagcagtcacattaagtggtgatcgaattgtagtcatgccaatctttgcagacataatcagggtatatcctccagtgagaggggatgaatatctaaccttgctcaa

SEQ ID NO: 4897 - DNA, 376 bp, Bos taurus
  Clone ID: 24-LIB34-015-Q1-E1-F7
taacaatataaattaatagaacttttcactttaatgcagcatgaacagaaaagttaatatgtgctcagcagatagagtgtttgcaaaacattcactatggagcatccacttcatcctgaggatgcattacggattgggtaacaaagcacagtctctccctcaaggactgttttgttttcatggaaaaattcagacattacataaacagagaggatgatataatgtcacgtacatatcagcagcttcagtcattatcaacatggggccaatataattattccctacgtcctaacccctttcctcttttgggtttgttttgtagcaaatcttacacatcctgttattttaactctaagaatttttaaaaattacttaa

SEQ ID NO: 4898 - DNA, 307 bp, Bos taurus
  Clone ID: 24-LIB34-021-Q1-E1-F7
ctagttctagatcgcgagcggccgcccttttttttttttttttttttttcatttatatttgtctgatttttttttgtttcttatttctggccaaggaaacttttactggaaaccagagccccaacagagaagtacagcccgtgggaagtctaagtgtaagcgggtcaatgcaaggcctcccaaaggaaagccaatgctcaggaagcatcccaaattgcaactggctgtcaagacaaggaaactgggcaactgcaggctgaaggcgcagtccatggggaccggaacccggcagtggaggtcagggtcc

SEQ ID NO: 4899 - DNA, 97 bp, Bos taurus
  Clone ID: 24-LIB34-024-Q1-E1-F11
ttcgacgcacgccactatactcagtcctaatattccagcttggccatcaacccagccacactttcagcacatgccatgagatgccctcctgtccccc

SEQ ID NO: 4900 - DNA, 419 bp, Bos taurus
  Clone ID: 24-LIB34-030-Q1-E1-F11
gggatttactaagactgaaaagttagtagaaaagctaagacaaaagtctagtttaacaggctactcattcagtgctttccccacttcagcacaaggagttttgaaagttttaatacatggcttttgttattcctaaaagtcagctcttgggagaagcattaacaagttggaaatatatactcgcaacgtgagagctctatctgtattatgtggcaaactagctgtatttggatctaataagatcaagaaatgatacaaggaattttcttttccccttcccaaacttttgagtcaccctagtaagtcagagtattaacatgtgctagatcattaagactccttcactcttcctgactgaaagatttttcatatgttccttataataaagaaaataagataatttcaattccaggtaaaaa

SEQ ID NO: 4901 - DNA, 416 bp, Bos taurus
  Clone ID: 24-LIB34-030-Q1-E1-F7
ccttgaggggatgcctggggtcgcggcccccgctacccccatccgagcccgcggcgctccgagcccaacatgtcttcactctagggtcaccctccggctcggtgctctgtggcggcgtgtgctgagtcatttactgcctttaacccggtcctggaggacacgtgccgtcggcaggacttcaaccccaacgagtacgacctgaagtttcagaggaatgtgcttgacctctctgtccagtggcgattcgccaacctgcccaataacgccaagttggagatggtgcccatctcccggagccgcgaggggcccgagaacatggtgcgcattgctctgcagttagacgatggctctaggttgcaagacactttctgctcaggccagtcgctctgggagcttctctgccactttgcccagat

SEQ ID NO: 4902 - DNA, 259 bp, Bos taurus
  Clone ID: 24-LIB34-031-Q1-E1-F7
gatttctctctctcttttttttcccttcctcagtaaatcagttacagaagtgttcattttgagaggatgaagtagctggcttttaacaaagaggtgttctttttttaaaaggaaaatcctttcagcaaaaacgtaacttaatgaattgtagattatgaaagtatttgtctacatccgcttcagtaagtgattaccatgtttaattgagtaacattttaaagcaaactctttaaggtaaacaattgtggtgaaggatcct

SEQ ID NO: 4903 - DNA, 406 bp, Bos taurus
  Clone ID: 24-LIB34-036-Q1-E1-F11
cttggcgaccccatggactgcggcctaccaggctcctccgtccatggaattttccaggcaagaaataggtgaagcaggttcacaaataaataattgtactatgacatggcaagcacctagtacttagtagatgctgttagatacttgctagattgataatggtcacaccaagatggaagtatttgtttttgtcttaggaattcagggacagaggaataatttacaatcaaccatcagttcatgaagataggacactgtctgccttattcacccccagcatctagtatagaatcaagcaaatgatgggtgcttagtaaaagttaattgaacaaatgaacggttgaatgaggagatggttgaacagaatctgaagaaggaataaagtttgtttgggaaggacgtgcac

SEQ ID NO: 4904 - DNA, 279 bp, Bos taurus
  Clone ID: 24-LIB34-038-Q1-E1-F11
aactcattggtaccgactgttagtcaacgaccagcacacacatgtaaacaggcacaatcgtactcacaatcgccaagaatcatgctgacctgtgtctgctgaaatagagctcagcatggctaaggatccgtcataggagtgtaatagctttacttcgcccgagcaacagccttctgccctgaaagatacgaccaagatctagggtgacgtacggctctgttagaatacattcgcctcactatgtcactcatgtacggacgttcaacatgaatgtggcca

SEQ ID NO: 4905 - DNA, 141 bp, Bos taurus
  Clone ID: 24-LIB34-042-Q1-E1-F11
acccacgcatccggagtcggctagctctcagctctcattgatcctgaaggcctcgcgcatctgctgcttcctgcccgtctggtcgccatggcacactgctggctcctcgatgactgcaggggcgtcatctacgtcgtcttg

SEQ ID NO: 4906 - DNA, 242 bp, Bos taurus
  Clone ID: 24-LIB34-043-Q1-E1-F7
ggagcggggagatacacagcagaccgccaccggccatcaatgtctagtctcgacgggtacaccacttagagggcagaggtatgagttgctatgcctaataatggaagccaggatcagttgcacagcatggggattcagtgggatcacttgcacagtttgcaggacgatgtatagctcaggaatcgcattccggcagagatcatgcaatttacagtcgcttaatccattgagtacccaagctt

SEQ ID NO: 4907 - DNA, 420 bp, Bos taurus
  Clone ID: 24-LIB34-048-Q1-E1-F11
gttttaagtaagcagcatatcatggatattgagtttttgtttttaatccatatcgataatcttttaattgatggatatatttacatttattatgataacttagataattattattcccacatattttgttattttctatttgctatgttattttcctctgctttgtttgtgttttcttgacttccatattttaatcaagttttcccagtttctctactttttcttgttggaaaacaatacaatacgttgctgtttttctcctggccactttgccatcccttaacatccagccccactggctctcttgccaatcttcaagtatcccaagcttcctccagcctcaaggccttctcacttcctgtacttaatgcactgctttcctatgtaattcatttttaacaagtatcaggctttatgtgt

SEQ ID NO: 4908 - DNA, 228 bp, Bos taurus
  Clone ID: 24-LIB34-051-Q1-E1-F7
cggacgcgtgggccgctgcaatgctgagtatgtatcttccactctgagccttagaggtgggggttcaccaggatcccttcgaggaggaggccggggtggaggggtgggctccagcggcctctgccgagccctccgctcctacgcgctctgcactcggcgcacggcccgcacctgccgcggggacctcgccttccattctgctgtgcacggcatcgaagacctgatgat

SEQ ID NO: 4909 - DNA, 241 bp, Bos taurus
  Clone ID: 24-LIB34-052-Q1-E1-F11
caaagagatgaggggaagaaaatggcttcctttttaaggtgttattaattgttcatatagtttatgacctaaaaatgatatttatttttaaaaatccaactttggtacctgtaacatagaaacattgccttttctatacattcctcatcattgtttgcccaaaaaattattttaagagtgtatgagaccagattaaatatccatattcagtttggtcaaatttttaaaactaaatatttaa

SEQ ID NO: 4910 - DNA, 239 bp, Bos taurus
  Clone ID: 24-LIB34-054-Q1-E1-F7
caaaacctcacggtgaatcgttgccagataaagcccagaggtcctttcagatgccaggaggaaacagtgcacctttgactcagagaggagcttgcctgcctgccctgcacccagaggcggtcaggtcagcccctgctccacgttgttgagcctgaaagggtgcttcgtctccgaggaaactgggcttcctttagtagcagctccgttgggttttgagagcagccctcggtactgacctg

SEQ ID NO: 4911 - DNA, 192 bp, Bos taurus
  Clone ID: 24-LIB34-059-Q1-E1-F7
cggacgcgtgggccctcacagatatgtatggaaataatattttaccatctatctgggcatccccattcaagttgatttgtaaaattaagcatctcacacagctagtgaacagttgagctgaggttggattccagtttttctcttcccttccttcttttcctcctcctgtttcattcttgcacacaaataaaa

SEQ ID NO: 4912 - DNA, 385 bp, Bos taurus
  unsure (99),(202),(349): unsure at all n locations; Clone ID: 24-LIB34-064-Q1-E1-F7
tgaaaggaagacatttcttaatggaaaccgtgaagaagtacaacggagaactgatcaatctcgccctccccacacccgcagcgcaaggggagccctcanctgcgtcgcccgggccccggagcctcgggggtcccccgcgtccccaagctgggccgttcttacctgcgcggcgacagcggagcaacgcccgggcctcctgcancgttccgcggcggctgagccgcgcttccagccgtcggtgccggtagcccttggggaagccgtgcttcaccacggccgcgcgaccctggaagcggccgcggaacacgcgcgcctcggcgccctgcttcaccagcttcaggctgctcangaagcggctgttccgctcccgggctgccgccagcgc

SEQ ID NO: 4913 - DNA, 198 bp, Bos taurus
  Clone ID: 24-LIB34-065-Q1-E1-F11
cttctgttggttcagacttgtttgtatttaacacgaccgagccaaggccattgtatagtcaagagaatatctgcatagaggaagtcttacggggagtgtttgttccccgagatgtccctgaatcgtgcacctcagaagcttaccagtggatgatcagatcccagttatacttcctaacaatgtcacagagtttattga

SEQ ID NO: 4914 - DNA, 154 bp, Bos taurus
  Clone ID: 24-LIB34-068-Q1-E1-F7
agcaaggatgccccctatggctgagttttgtacgtttcaagcccccagatcaaacaggcgagtccatcccaaaggcatctcgcattccttaagagagtaatgtcccctgaacttgctccttctatctacacaaacacccatggcagcataccgg

SEQ ID NO: 4915 - DNA, 400 bp, Bos taurus
  Clone ID: 24-LIB34-073-Q1-E1-F7
aaggctactgagttcgaagcactgaatggccacagtctcactctgacatgccaaactgagctccaggacgcaatgtatgcaacttaatgaagtggaacagaattatagagtcaaggcttcaaagctccatttcatagttttcaatgccgagactataaacatgcattggatgggaatcaccattgggagaatgaacgagactaagcagctgtcgttctatcactcaaggctacacatgaagttttaatagatggatctcacagcgatgccacggatgcatcatgtatgacgacgttgtcatacatattaggtcacttacttgaacagaattcactgctcttcgtgacattgaaaggtgtgcatggcgacatcccagatactaatgactatctgaacgtat

SEQ ID NO: 4916 - DNA, 380 bp, Bos taurus
  Clone ID: 24-LIB34-075-Q1-E1-F7
aagcaacactccttgacatccgtggtctgcgccacacggccgcccgccaggagatcctggcggtgacccgggacctggaactctgcgaggtggcagccctgtccccgcctcgggaccgtgccttcttcgcagacatccccgtgccccggccgcctatctgcctcagcctccctcttttcctgggccgcctcaccctctcccggctggcctgcctgccctggcctacgcctcaggctccgtctccattacggcggccccaggcccgacgctgagactctcccaaccccacctcagtgccccccatctttgctgctgacacaccatcctccctcaccccaactcgactcccagcctggcacacagacccttgggctggcaag

SEQ ID NO: 4917 - DNA, 236 bp, Bos taurus
  Clone ID: 24-LIB34-076-Q1-E1-F7
cctacgtctcccttgggacaactcattggttcgtctgagtgtgcaccggatggctccctgtggtgtcttcctgcgtctcatgggctggttcagtgagtggtagactggtgatttgctgttgctgttctgggttgtggaacctgatggtctttgtcagtctgagatgttcgattttgtatagtacttttcaagtgatctatagtaatacctgtctgcgggatgagacctctggacca

SEQ ID NO: 4918 - DNA, 425 bp, Bos taurus
  Clone ID: 24-LIB34-082-Q1-E1-F11
agtgcaaatttattataaggaatgttgccagaaagagtgctgctgtgtaaaggaagtagaagagaaactatgggctaaagtttgtttctgtcttagttcactgggcttcatgctggtaagggagtcagttacctttctggaataaattatagccagagttacaatactcggatgctgtgttatgactcatttgagttatttctcaaatgcaggtaactgacattttggcatcattttcttaggcttttatcctaaccatataaaattaggcctagcttacataatttctgctattagttatacttggcagcgtgacgttttattttttataatttaatgaaaatcagcaccatagtagctgatggtaattatactgacatagttactgggtgggggtgggggagacactcagtaaccacatgttt

SEQ ID NO: 4919 - DNA, 398 bp, Bos taurus
  Clone ID: 24-LIB34-085-Q1-E1-F11
agttcttttcaatgatttgatgctgttaaaactttatttctgaaagtgagattcttaaagattttctgagttaattagttccaagaagtaatgtttctataaaagaatgataggattgggaattccttggtagtccattggataggtctcagaactttttattgccggggccagatttccatcattggtcagggatcttatcagttaaataattcctttctgggaatccttgagaaaagagtaggcagctgtcagtcttggataatatagtttggggtaagaaaaggatcttggatctaaaaattcacttaaaactttttagtttgtttctaacgtttttaagatccaggtatgcattgctctacatattggattttatttactgttttttaactttc

SEQ ID NO: 4920 - DNA, 152 bp, Bos taurus
  Clone ID: 25-LIB34-001-Q1-E1-G1
cggatagcgcgttcggctgttaaccgaaaggttggtggttcgagcccacccagggacgggccttacactttttgcttacccggccgagccgctttgggcgacggcccggggcatccggagcgctacagaggacggaccgtagaggttgtctg

SEQ ID NO: 4921 - DNA, 391 bp, Bos taurus
  Clone ID: 25-LIB34-014-Q1-E1-G1
gtggacgccgccgcgggaacgcgagcccggtaatttttcaaccgagaaagtcgaggctttcgaggttggccgggtgagactgagcgagtggaggctccagcagctcccttctgacgtgacacgcgacatggaggatgagcagaccctccagcctggcgacgaggccgtggctcccgcgcggcgcgcgtctcccgggtcggagtgcggggacgaagcccagcgtccgaatcctgagaaaaagcaacggtgtagacttgatggccaagaaacaaaaacatctacgttgattacctccagtgcaaatgatttcagtgacccagtttacaaagaaattgcaattacgaatggttgcattaacagaatgagtaaggaagagctcagagccaaactt

SEQ ID NO: 4922 - DNA, 106 bp, Bos taurus
  Clone ID: 25-LIB34-015-Q1-E1-G9
ggattgggaaaaagggcttgttactaatgtttcctatttattcattaataaaaagtgcatagtacaagccctttttattaatgaataaataggaaacattagtaac

SEQ ID NO: 4923 - DNA, 407 bp, Bos taurus
  Clone ID: 25-LIB34-018-Q1-E1-G1
agctgaacctcctactgtccgtttctaaataacttggcccattgggctgtgcgtatggatggccagctggcaggaacgggctgccaggtccagaggctgcaggacaccggggaattggacgagggacgtccccagaaccacacggccgccgctcagggctgagcacagaacgaaatggaagcaaagtggcaatgatttgtgtttcccttttaaaaacatcaaaatgccaaagataagctatatagtctatgagcgctgataactgcctcacttaaatggtcacaagcagtgtaagtttttaaggggagaaacttgtggcgggcacacagggaaatggttcttaagaaagatgcggtgaaaataggttacagtaaataccgcaaagagctttacgggaatacagctaa

SEQ ID NO: 4924 - DNA, 349 bp, Bos taurus
  Clone ID: 25-LIB34-018-Q1-E1-G9
atatagttcacgttgaaatttatgtattgaacagtcatagtggttcaattttctgttatgtgtttttcgaacattaacataccttggacactatatcacttgctcaactggactgttgatatttgtcattatatgtgtactatgattattattaatgattacaaacactatggaccattaacctatgatgaaatcagtactttaaaatattttcaaggtatctatgactttatgaaatactgtcgcttgagaatcacatggcacatacctgttttgaattctacatttaccaggaatgtattatgaattctacatagaacgaagtaaaagtatctgtgtaaaacacttt

SEQ ID NO: 4925 - DNA, 439 bp, Bos taurus
  unsure (209),(286): unsure at all n locations; Clone ID: 25-LIB34-021-Q1-E1-G1
gggaatctgggaaaaggcttcagatattaggctgatattaaggatcagagtcaagtcacaagaatcacttcacctgtgtaggtagactggagtcaggacagacactgggactaaggccaaggcaagcctggggtcagaattcagatagtcacatgagaaccaggggattcagctacatgagagtaagacaatttcctgctaactcctgngcatggcagaacagagaagttggactcctgtgagcctctctgttgctgggcactgcttgccaggttctcgcagctcnccagctcccccaggggagctctcaagaccttcttttcctcatgtggttattcattactcctttccttgttccaagctggagtggaaagtgggacccagtctaccctcctttgctctccctgaagaaatggacataaatctgtgaagtatcaaa

SEQ ID NO: 4926 - DNA, 408 bp, Bos taurus
  Clone ID: 25-LIB34-024-Q1-E1-G1
ctcgtgggacgacgcaagactctagaatgactcgtaatagaggaaatgaacacgtgagtaaggacaagaatacagaacagatctgctgtaataaacttgctttaaagaattcacttaaattgctaccaccataatctagctttttgtgttctcttttgaatttatggtgtatgagctgttttatgtcctacattttctcattctaactgttctcgcccgtccctgtgtatgaagaagaggtgaccatcatggagctgtatcatagtccatatttccttcctctcagctgcacactgcgcttttgttcagtccttgcttaatatgttcatgtatcttaatcagtttctgctgagagcgtttttgcttccttttggagtgttgtctttgggttaatttcgtcttctggga

SEQ ID NO: 4927 - DNA, 410 bp, Bos taurus
  Clone ID: 25-LIB34-026-Q1-E1-G9
gctggaccaggggccccaagcacaggctggcaggcctgggccctgagctgcagcatggaacggccctgtcaccccagctgtcaggaccacacagccctgcctggagtcagggaccttccagggtgccctcagggttatcaagaagctggttgactggggagcccagggaggtctggggaagagaaagggcgccctgccttcactcagcaccatcggacttgggacaggcaggtgtttgcactattgggtgccttgtggttgccagggaacaatgaaatccccatcccatggtcctcaagttctcacgaagtggacaaaaggagaagaccccagactgtgcaggggtccttccctggtgctgactacccccctcccccgcccactgccccagacacagcgtggagggctca

SEQ ID NO: 4928 - DNA, 374 bp, Bos taurus
  Clone ID: 25-LIB34-027-Q1-E1-G9
gggtcggtcacgcatccgtcgacagtgatgtcagaatccaacaactccaagaggttttacatgacttgcagaagagactggagagctctgaagcggagaggaaacagctgcagggcgagctccagaccaggaggacagaatcagtgtgcttaaacaatgccgacatctcggagaacggctccgagctcagccagaaagttatagagactcataggatatacgacgaagctatgaaagaagtcctgagtgtgcataagcagatgaaactgggcctggtctcaccatagagcgtggacacttactcgcacctgcatgagctgaggatcaccgaggaagaaatggacgtgctcaaacgggacgtccaggggcccctg

SEQ ID NO: 4929 - DNA, 400 bp, Bos taurus
  Clone ID: 25-LIB34-031-Q1-E1-G1
cacacttctgttcacgtttcattgaccagagccagtctcctgccaccctgacatcaaagcaagtggggtgtccatgccaccttgcctggtgctgggagtgagccagatcccctgtgatggccacacgccacagtctgcaagtccacatggaacactgcctcatgcacactcgtgcactcacacacacacacagacaacacacacacaacttctcggcacacccaacttgtctgatcggttgatcagctgatcctcaggcgttgagagcaaggaccctcagtttgaggagggaatcatttcctaagcagttgatcaaacatttactgagaaatggctctgcctgcggagccagattgaagccccggcgggcaagcttgtgtctccgggactcgtcctggct

SEQ ID NO: 4930 - DNA, 412 bp, Bos taurus
  Clone ID: 25-LIB34-032-Q1-E1-G1
gcgttcttcactaagattccccctaatctctgtaagtggttctttggatccctcgtcacatggctttgggcttccctggtggctcacatggctctgctcttgccagagggacaagaatcatgtctgagaaaatggactgtggtgcgggcctcctcggcttccaggctgaggcctccgtagaagacagcaccttgcttatgcagaccctgatggaggccatccagatctcggaggtcccgcctaccagccaggccacagcagctgccagtgcaccgaatgctagtcctcagagttcacagcccccagcagtcagtgagatgggtgatacgcaggctttagcaactgccactaagcctaagacagcctttaaggtccaaaatgccaccacagaaggtccaaatgctgcctatga

SEQ ID NO: 4931 - DNA, 292 bp, Bos taurus
  Clone ID: 25-LIB34-037-Q1-E1-G1
gcggggctagacacgcgtggctaaaagctatgtcaaatttgagttagcctttaagaataaagatccctgaatagttgatgttttctaaaaggaaatgattttgtagagttcgtaatctgagtatactttttagcgttaatagaagatgattttaaggaaagcctgggatgttgtcggtgagttagaggaaatagtatgccagatgcagaaattttaagggtaataactggtaagtaggtagtaagaaaaatatataagagcacaatgagttagatagtttctcacgtggaat

SEQ ID NO: 4932 - DNA, 445 bp, Bos taurus
  Clone ID: 25-LIB34-045-Q1-E1-G9
attttaaggagaagaaaagttgaagtgagtgtacagccagaggttcctgcctccacacaactcttagcaaccatacagaaagattcagaaaaacatatcgaagtagaactacgtaagtttttggctactaagaggacccctgactttcataccattattggggatgtaataataggacttctgggaagatgtaaagcagagccatcattttatccccgcaactgtctgatgcagcttgtccaaacgcacgtgctttcttacagcctgtgccctggcttgatggagtttgccttagaaaagaccgacgtgcagatcctacaactctgcctacagcagttccctgacatccctgagtcagtcacttgcgcttgcttaaaagttttcttgagcattggtgatgacactcttcaagacacagatatcaatatggagtcagtttctgact

SEQ ID NO: 4933 - DNA, 100 bp, Bos taurus
  Clone ID: 25-LIB34-052-Q1-E1-B8
caagagggagcccaaggtgccgacagccagcccctccttgagcaaggcacggccgctcagagcacagcgtggggttaataaacgtgccgcttttaccggg

SEQ ID NO: 4934 - DNA, 224 bp, Bos taurus
  Clone ID: 25-LIB34-057-Q1-E1-G9
gtttaaaagacaaaccaacaattttggaccattactttaaaaattaaataatttacactgaatttaaaattgctagacatttaacaaaacatatggctcaacttaataacatttatatagacataatttgagaatcttaacacatatataaatatgtaagtatacataaaaccccagttttaaatgtttaaaaaaattagtacattataaatgtataaaaattt

SEQ ID NO: 4935 - DNA, 241 bp, Bos taurus
  Clone ID: 25-LIB34-060-Q1-E1-G1
gcgcgggcggggagcctgtggcgcgctggagcccagccacccggccgcccccttctgccggcgtcgcgttcaagggtctgaggaggctccgggcggctgagcagtttccgcgtctgctgcgccggccccgcgatttacagccctgaagaatctactttttttccctcattttttcccctgcagtaataaatcccattatggacacccagaaactttataaagggatatagtttgaattctg

SEQ ID NO: 4936 - DNA, 118 bp, Bos taurus
  Clone ID: 25-LIB34-060-Q1-E1-G9
gttgtgtaatttttttactcccagaaaaaaatcttggaatagttcttgattaaatttccaatagtatgagaatagtgtatgaaagatctcacctgaataaaatacatttgtttttact

SEQ ID NO: 4937 - DNA, 256 bp, Bos taurus
  Clone ID: 25-LIB34-066-Q1-E1-G1
gcccggggccaggcagtgcccgcctgcgcagctctaggggcctttctgagtgcatgtggacgtcccacttcagcagtgaggacactggcccttgtcagctggtgagccttctgatcccatggcagcactgcccaaggatgtttgcgcctgctgcgacatcgtgccgacggacatgcgccgaggagcgcgacagctcctctagagccggaaggggccatgggtgttggcttacatcactgttgtgctgcttcacttt

SEQ ID NO: 4938 - DNA, 196 bp, Bos taurus
  Clone ID: 25-LIB34-068-Q1-E1-G9
caccattcaaaagtcaacatacacaaaatcaattgtattagatggctaataaaggatacatcttcacaaaagaataaaagttaatttcagtaaacgtaaatcctttaagaaagttgggttataaactagtttataatattaaatacttttatcaagaatgaaattatttcatgcttaattatactccttgttttgt

SEQ ID NO: 4939 - DNA, 239 bp, Bos taurus
  Clone ID: 25-LIB34-070-Q1-E1-G1
cactactgtaggtaaaagtctaatccatagtgtgtttccaacagaagagtctgctaatgttgaacattatgaagcactagtgtaatgcatctcgaatcatcacgaccaggagaagctaatagcgataaccttagacaagttgatacctctacatgacattgcaaatgtcgcatgattccagtcatgttactgagcttatgatctagaggataaagttgcatcatcagaccagtctccag

SEQ ID NO: 4940 - DNA, 338 bp, Bos taurus
  Clone ID: 25-LIB34-072-Q1-E1-G1
aatctagatcgcgaacggcctgtcattgtatcattttttaggcggagtagagagtggaggtatgtcaatggtacgtccataactcatcagtgctctaaagatgggatgagtatcctcagtacggggtctgaatatcctttatcttatgtgtgggtatatctatgaaatgactaaaatgatggatagcaacaatcacgatacacagatagatcattctacatatacgtacatgagtgcttgaagttgatgatctcctcaattcgaaagcattgcaaatatactgcatgcgtaatctactactttgatgactatcgattgtgatatcaggtctgtatatg

SEQ ID NO: 4941 - DNA, 395 bp, Bos taurus
  Clone ID: 25-LIB34-086-Q1-E1-G9
gggccgacgcacgcgtccggatgaatctaaagcaacccagaggcagtttactattctcacctttaatgatttaatatcatctgcagttcctatgacccctgaagatccattttgggactgtttttgctttacagaagagatttcaataagaaatggtacaaagtcatgatatgattttctgagtaacaaagggaagtgaaaactgtagtcttctgtattcactaaaaaataaatgcctgagagtatcaaattttgtttcacaaaacatttttaaaaagaagaaacaacttttcctattaaaaaagcagactcccagatcaagattcgtgactagaatacatgtttgcctcttcttcctccccaaaatcacattggatttgataaaaactaaaaat

SEQ ID NO: 4942 - DNA, 403 bp, Bos taurus
  unsure (384),(389): unsure at all n locations; Clone ID: 26-LIB34-006-Q1-E1-G5
cactgagttaggctttgaagctgtgagcagagagaagcgttcacaacctcaagcagctaacgagctgactggggcaccctgaaggttcagcgtctcaccctgcttcacgaaaagtcactgctctgcagggaggtagacttgaggaccagagagaccaagagcacagtcccagtcaagtcttctccatttggtttttgagggaaacagtgagctaacaagcagcacttgcccctggaaatttggcctactggcctcaattgggtttttgttttacacgtggtcacagcagaaccaatacagaagtggatttctcctttccacttcttgggaaatgagtatgtcaactcaaattttctttccctttgtattctccatctgccctgngacanacctctgaccctct

SEQ ID NO: 4943 - DNA, 399 bp, Bos taurus
  Clone ID: 26-LIB34-009-Q1-E1-G5
atctggagaaaaatttaccagggtagggggcagaaagtgagagggcaggcattcatgattactgaatcttgaaagaaggctgctggttttatatgtatagctcagtgccagtgaagagcaagatatactggtatgggtgaattgtggtaaaatgcagtgatcctccaagtgtgctagttttttgctcacgtgtcatccccacaccacagttcactgttttatctgtttgcccctgtaactacaggatgtagcccagcggatgctggccactggagagtgtactccggaggatctgtgcttctctctgcaagttatgaagttaagagctgggatagaaaagtggagctgacagaactaaactgggattccctctgacgttttcaacttacctggcccccc

SEQ ID NO: 4944 - DNA, 420 bp, Bos taurus
  Clone ID: 26-LIB34-014-Q1-E1-G5
aagaagatcacctgcatttcttgcctttcatcacctcaatgtatagcactttgtaaataaaatgcactcaataacatacctacctcagagagctgtgaggattaaacataaagtgctaagcagagtgcctggtacagagagggcactcaataaatgttacctaaagttagtattcatgacaatactgttaggacacagagctgtcatatataagatagttccaatttttttcttttgaataaaaaaaagttttataaacacaatataatattttcttacttccagcaacaatcccataatgacaagggaattgtcagaattacggggaatattaagctgtctaaatacttaaacccatactcgatatttctaagtagggtataagagtttttcttgtattttttaaatttgcttttgcct

SEQ ID NO: 4945 - DNA, 398 bp, Bos taurus
  Clone ID: 26-LIB34-017-Q1-E1-G9
gtggccgacagatttgctcctgcgtttgtgtggggagagctcggaggcaggaaagaggggaccgagaaccttcgctgaaggcctgagggccagatccacctgccacaggtgaggaggaacatgtgagatggagggagctgccgagagaggcgtcctggccgtgctggtggtcctggccgtgctggcagcctgtggatccagcagtgaaatcatagagggtcccaagaatgtcacagccctgaagggctcggaggctcgcttcaactgcaccatctcgcagggctggaagctcgtcatgtgggctctgagaggcacagtggtgctgagcatgacacctaatgagaccatcatcaccagtgaccgcttcacttcggcaagctaccaagagggccggaact

SEQ ID NO: 4946 - DNA, 130 bp, Bos taurus
  Clone ID: 26-LIB34-020-Q1-E2-G5
catcattatggcaaagttaactgggttaactgcagtgagaatcaccatcccgacagatctgcatactccatgagtcatatacatcaaaacccacacctccagtaagtattacacatcacgtctaatacat

SEQ ID NO: 4947 - DNA, 392 bp, Bos taurus
  Clone ID: 26-LIB34-023-Q1-E1-G5
tacacgtgaggcatatgacgtgttcagatcatctcattcctctggcttcttttttttccaagagcagcagggctgttctgctgtcccaccatgatgcgggctgtgctgctcctttgctgtgtcttgatgtccccagtggctgccttcccaagaaatgcccaggaaggggtcctgaccttccagccatctatctcagaaattgggcatcctttgaacctgctctccaaccagatccttctaccagaccctaaaacttgccaagatctcttgcatgtggccccctccttagcccctctgcctgagtacctatccaacttagctctggaggtggtcttggaagagattggttgcacaactgaggctcacattctgcagctccagcttgttaagat

SEQ ID NO: 4948 - DNA, 347 bp, Bos taurus
  Clone ID: 26-LIB34-028-Q1-E1-G5
cattactcataacttagatactgacatgataggaagctctctggcttagggaaagtaactaaattttagattttagaacatggactcaaagtggctgaaagaattggttgatactttaaactggtaacatgttattcctctggcatatccttcaggattgttccactaaagttttatttttcaaaaaatttacttcacattattgtatgtaagtgatcacttgtcagtgttccagatgtatcttagctaaaactagtgaatgccctaacttagatggttttgaagcctgtacatttggtattgtttgacccttaaacttttacatctcttagcatggaggacaagga

SEQ ID NO: 4949 - DNA, 408 bp, Bos taurus
  Clone ID: 26-LIB34-029-Q1-E1-G5
ggcagttcagagaaccaggcaacccagaaagccaggcgtggagactgatcctgcgggaggaaagggttcatcatggcggatgatctaaaacgattcctgtataaaaaattaccgagtgttgaggggctccatgctattgttgtgtcagatagagatggagtgcctgtcatcaaagtggccaatgataatgctccagagcatgctttgagacctggtttcttatcaacttttgcccttgcaacagaccaaggaagcaaactcggactttcaaaaaataaaagtatcatctgttactataatacctaccaggtggttcaattcaatcgtttacctttggtagtgagtttcatagccagcagcaatgctaatacaggactaattgtcagccctggaaaggaacttgctcca

SEQ ID NO: 4950 - DNA, 178 bp, Bos taurus
  Clone ID: 26-LIB34-034-Q1-E1-G5
agtctgcgacctcggtaacgggggatcggaatcttaacgctctggcacacctcaggcacttgaacacagtggaggccgttatgggctacgtccgatccatctccgagttcaaggccctacgatgcagcagcaagccttctctgatgctgtctgcggaacaaatgtcatcgtaccatta

SEQ ID NO: 4951 - DNA, 353 bp, Bos taurus
  Clone ID: 26-LIB34-037-Q1-E1-G4
caaaaactgtagtaagaatcttagtcaggtagattgttcatctttaaaatgttgtagagcccaggagcatgcatgccctgaaaacccaagcctcacttggattttagaacagacagccagtttggtaaaacagctgggagtatcagtagacatattacaacacctcaaacaactgtaaaaattaccttccctttaataatggaggcaatgttcagaacattcttagaacattttgtttctgaacaagctaaccaaaatttgcactggtttctacagttcacttgtaagggtatcccttcatgtaatgttgaaacatcttcaaaattaatatattaaaggtaatataatccttc

SEQ ID NO: 4952 - DNA, 415 bp, Bos taurus
  Clone ID: 26-LIB34-044-Q1-E1-G5
cctctactgaaagtatcctgcaggaagctacatcctccatgtctttggtgacccagtttgagcaggaagtagccaccctccaaagaatcatgcatgacattcaaaccagtgaagagatgctcacccaaaagatgaaaagccttaatgagaaattccagaatgttacagatttctggaagagaagcctagaagaaatgaatgttaatacagacgttttcaaatcagaatcaaaacatatacattctcaagtcactgtccaaattaactcagctgaacaggaaataaaattgctcactgaaaggctaaaagatttggaagatagcacagtaagaaatattagaactatacagagacaagaagaagaggatcttctgcgagtagaggagcagcttggctctgacacaaaagcggtgga

SEQ ID NO: 4953 - DNA, 173 bp, Bos taurus
  Clone ID: 26-LIB34-045-Q1-E1-G5
agcccgatgcctgatagctcggggagccacaggggtcagcgaaaatgtctctaaccaggcctcccaatggggactgactaaccacagtcactactgctccactaacggtggcttggagacactgaacagagtgaaggctgtggagcttttgccacagagcatccgtgtgaatg

SEQ ID NO: 4954 - DNA, 374 bp, Bos taurus
  unsure (331): Clone ID: 26-LIB34-047-Q1-E1-G5
taactatcctaacaactgatttatttgtatgtttccatgtcataccataatgatttgactaccttgataatacagtgccttctgatatttccaaaaccaatcctcctactctctaactacacattgttttctttttttccatacttttctccgatatctttgggtgttttttcatccatataaattctaagaatattttagacaattaaatcattttagaattccatttggggttgaactaaatttattattggctttgagacaattaatgtttttatgatattgagttatttcaaaccagaaaatattatattcaactttgttaagatcnttccattttttataagattttatagtttcctatagatccttat

SEQ ID NO: 4955 - DNA, 174 bp, Bos taurus
  Clone ID: 26-LIB34-051-Q1-E1-G5
caggagcagcctggagacagtgctacagaagtctgcaggactccgaatgactttgacctgtacgttgttctgaaaatcatcgggagaggttggcggtggaacaagaaaggggaagccaaacacaggccaggagcagcctggagacagtgctacagaagtcccttccagggaacc

SEQ ID NO: 4956 - DNA, 223 bp, Bos taurus
  Clone ID: 26-LIB34-058-Q1-E1-G5
ggttcagagcgaggacttgtagccatcacactgatcatgtcactcctctgtacgagcctttagcgctcgctttggcaggtgctagtgcgatcaaagcgtgtcattgaactgtgccccgaggtgggcgctatgcttgaggtcgtgcacacgttccaacaggtgcacatatgtagtgtatgtgtctaaataatgtcatggtatgaacatgaacatcagattagtc

SEQ ID NO: 4957 - DNA, 154 bp, Bos taurus
  Clone ID: 26-LIB34-058-Q1-E1-G9
tggctccacgcgtcgcacggacccgcagcacatgcttgcgcgcatctcacgagatgcagactccccagcgagattgggtgggtgtgtgcgcagttacaactgcaggccctgggaatcgtaaggacataacgcgtatgcagggtgagaagcttcc

SEQ ID NO: 4958 - DNA, 236 bp, Bos taurus
  Clone ID: 26-LIB34-060-Q1-E1-G5
cttcagtaaaatttgtgttttttgatattttttaaggtgaagatcactgcaaaaggtatgtttttctgtttcatattgattgtcgtttcctgtttacatctggacttgttttcattcagagccagaggaaaagattttcagactttgtctcagccagccatgaaatccatccaatacccagggctctcttttgatctgctaatgtgatgtcactttatgttataaaaaccactttt

SEQ ID NO: 4959 - DNA, 150 bp, Bos taurus
  Clone ID: 26-LIB34-068-Q1-E1-G5
tacttttggcgccacgtcatgagagcctcaataccatgctgagtgggcatccttcaacactttactgtcttcagggatcttcatgcaccaatgtgcacaaattctcccgcgacaccagagccccctccggccgagcctccccactcctca

SEQ ID NO: 4960 - DNA, 54 bp, Bos taurus
  Clone ID: 26-LIB34-069-Q1-E1-G5
gacacattaggacaaccgtcagaatttccgacgcctggacctaaaatctttcct

SEQ ID NO: 4961 - DNA, 324 bp, Bos taurus
  Clone ID: 26-LIB34-082-Q1-E1-G5
cagaaaggtgcagcatctgagacgccctctgaccccccagtgcccttctgggagaaggggcagcccctctgagtcccgcttgtgcgtggagtcacgctgcagtgccgaacagtattagctcccgttcccgagtgtggactcaaggggctggaggcaggccaggaacttgctcctgggcccgcccaccaagactggtacctaacctcttttcctacctaaactctccggaagctctttgcggtggtctgctgtgccctttgtgccctgtggcacttccatgtcttactggcaaccacacaactcagggaaaggagtatctggggg

SEQ ID NO: 4962 - DNA, 409 bp, Bos taurus
  Clone ID: 26-LIB34-083-Q1-E1-G5
agaaatggtttttattttaccttgaatttttatagtttaacacaccaaggttccaaatcagtctagaaggctaactcataatgttacctgaatcccttatgtggaaattttctcttgagtaaattagaattattatgtgaaaacaaatgaataggttaaatttctcattcttaaacgtatagatacgtttgggagcattttctcagtctgcatacagatttgacactgccaattggcttgtcctctaaaatcgttcttttcagttttaatctgatcgtataagcaaatggctgagcaaaactgtttaagtaatagtaaatactgaaagtgaaaacaagaagattttgatctgatggcttgttcagaattaataattcttaaatgattttcctctgacttgacaggggaa

SEQ ID NO: 4963 - DNA, 404 bp, Bos taurus
  Clone ID: 26-LIB34-085-Q1-E1-G9
agggggcatcagcctccaccagcagcattgcctcttcccctgactatgaattcaatgtgtggacccgaccagactgtgctgaaacggaatttgagaatgggaacaggtcatggttctacttcagcgtccgaggaggaactccagggaaactcatcaagatcaatatcatgaacatgaacaagcaaagcaagctgtattcccagggcatggctccctttgtgcgtacactgcccactcggccacgctgggaacgaattcgagaccggcccacctttgagatgacagagacgcagtttgtgttatccttcattcatcgttttgtggaaggccgtggggctaccaccttcttcgccttctgctacccattctcctacagtgactgccaggatttgctaagccagcta

SEQ ID NO: 4964 - DNA, 412 bp, Bos taurus
  Clone ID: 27-LIB34-002-Q1-E1-G3
aatctggcacagtcaagtaaatatggaaataaagttaaaaacatttaaaatattagattacataaaaaggtgtaaaaataattacaaaagtgtataaactagtgtacataagtatttcttgctagcttattattgtatacatagcaaagcagtgttagacagtatcttgtgcttatagtgtcctaagcaaaggtgctgagtaaagtgtgaaaaaatataatttttcattacaattgtatattagtgatctgaggagaaaggatttattgccaaccactcttgagccatctgctggtgtttttactgctttccagttgggtgcacgttagaaagaatcatcatgaaaatccactggttttagttaagagtgtgtatacactgcagttttatgtcaataaatatatttctaatt

SEQ ID NO: 4965 - DNA, 396 bp, Bos taurus
  Clone ID: 27-LIB34-003-Q1-E1-G3
cagtctatcttcctcccgtggagcagggcgcgatgagctgggagctgctgctctggttgctggcgctgtgcgcgctgctggcgctcgtggtgcagctactgcgcttcctacgtgccgacgcggacctcaccctgctgtgggccgagtggcaggggcgacgaccagaatgggagctgactgatatggtggtgtgggtgactggagcatcaagtgggattggagaggaactggcttaccagctgtccaaactaggagtttctcttgtgctgtcagccagaagaatgcatgagttggaaagggtgaaaagaaagtgccttgagaatggtaatttgaaagaaaaagatatactcattttgcgccttgacctgactgacagaagttcccatgaaatggcta

SEQ ID NO: 4966 - DNA, 340 bp, Bos taurus
  unsure (167): Clone ID: 27-LIB34-004-Q1-E1-G3
caagcagttgtttaagaacattgttttaaaggaaacaaaagtggctatcatgtggtttttactgcttattttttgctttattgcctgacctgtttattttttacatacttgatgatacttgggtgtattaaggaggacctgtggatacaatataatgtgtaccttanaacacagaatgtcattaattacattaataaacataagacagtagccacattcaattaaatacattatggcattttttttcctttaatataatgagtatattttgaaattttaaagaagctagtactagtttataagtcaactctaatgagcatctctgtgttctaaatttttt

SEQ ID NO: 4967 - DNA, 264 bp, Bos taurus
  Clone ID: 27-LIB34-006-Q1-E1-G3
catctgtgagtctgtccatcctgccgctgtctgtcccatatcatggccaagctgttggtgctcatcctcttgggactgtggctggcattcctcatggattaccggtcctcttatctagcaccacatgaacgtttcacaagaagtcaagtcagatacatcttcctaacagcacattgtcaccaggatcttcaccatggtgctgaaaacctgggatatctatcaacttcaattcgcattcattatttacggattaccatatctttg

SEQ ID NO: 4968 - DNA, 200 bp, Bos taurus
  Clone ID: 27-LIB34-008-Q1-E1-G11
tttatcctgcaaccacatgaaaacagacagtgccgtgtgccctccacccaggcatttatagcatgttcccaagctggcactccccaaaggctttaaaaattctttaagttaatccccgggtaaagttccccccttcctggggcccccaagttcaagtccggaattttacaaaagggggtgtttccaaacaacttcaacaa

SEQ ID NO: 4969 - DNA, 328 bp, Bos taurus
  Clone ID: 27-LIB34-015-Q1-E1-G3
tcctattccaactaattgcttccaaagtgataattggttagtggcagagacaaaatctgaacccaaacccaaacctgtctagctttatgaagcccagagtctttttccactatgccatgctgccttcctattccaactaattgcttccaaagtgatacatggaaatccatgtcattactttatatccctatctccccaattgcagaaaacttcttcagggttaggacctatgccttttactgtatccatgtctcataccacctaaactttcttattcaacagtgccttatcaacatcatttcactgctaataaaaataactaatggcc

SEQ ID NO: 4970 - DNA, 393 bp, Bos taurus
  Clone ID: 27-LIB34-016-Q1-E1-G3
gaggatgaggaacaaaggcaagggtttatgtggggttccctggaaagcagactcagatggagatcagcacacaggaggtgctacactcgagagcagtacttgtggaaggaagggatggaagccacctgggcagaagtctaattgccattcagtcgcagctaaccccatatgagctctgaattgattcacggggaccatgtcgtataccccaatagagatgagtgattgggtgcacgatcccccccaggaaagggtagtaatagacatgagtgattgggtgcacggtccccccatggagagggtagttttgatcaagatggctctcatcagcccatggcaatgtccagtgaagtctgagcactgatatccaactgcaatcacactctcaacaac

SEQ ID NO: 4971 - DNA, 413 bp, Bos taurus
  Clone ID: 27-LIB34-018-Q1-E1-G3
ggtcgcccatcctgttatcttcctgggagttacttcttgtggaattgagagtaggcggcaccctcaagggtctcccgtgacccggaccgcggtggcggccccgctgacgggatgttccggagtttgagcagctggtttggcttggagcagccggcggcgggtggccggcagtcccagggagacggacagcccaggggacacgctccacccgatcagcgctccgaggcggtggcggagtcagtggagggggagccacagctagccgggaaccaggagctccttcatcaggccaagggcctcggcaactatctgtttaactttgcaaccgctgctacaaaaaaaataactgaatcagttgctgaaacagcacaaacaataagaaatcagtagaagaaggaaagatagatgacatc

SEQ ID NO: 4972 - DNA, 331 bp, Bos taurus
  Clone ID: 27-LIB34-022-Q1-E1-G3
ggcacttagatcaagctgccgctgctctggaacctgatattgttgttaaacgacaagaggctttagcaactgctcgtttgaaaatgcaagaagaatttaatgcacaagttgaaaagcataaagagaaattaagacagcttgaagaagaagaaacgagacagaagattgaaatgtgggatagcatgcaagaaggaaaaagttataaaggaaatacaagaaagcctcatgaagaagacagtcctgggccttctacttcatcaatcatcccaaagcgaaaatctgacagaaagcctctgcgtccaggtctccaggaacaggttccaccaccttc

SEQ ID NO: 4973 - DNA, 114 bp, Bos taurus
  Clone ID: 27-LIB34-026-Q1-E1-G11
tcgtagttcgacgcaacactctaaagtgagtcgtattatactcaggcaatcgaagacgttgagtctcgagaacatcgcatgcagtcctttcattgaacacaggaggtgatactt

SEQ ID NO: 4974 - DNA, 169 bp, Bos taurus
  Clone ID: 27-LIB34-026-Q1-E1-G3
attctagatcgcgagcggccgcccttttttttttttttttttattttttttattttttttttttatttttctttactttgttttgtttgttttggcatatccaaaattgaacggagggacctttaaaaaatgagacatggaacccagcactcaatcaggatggccccaa

SEQ ID NO: 4975 - DNA, 427 bp, Bos taurus
  Clone ID: 27-LIB34-035-Q1-E1-G11
gggtctagccacgcgtgccgaaaaatacaaatatatggccttcacatcaactctagtttgatccctctagctatattttttctgtaaacatttcctataaatagggaataccattttacatacttgtttacaagtaccttacatactgtgtataccccactcgccagtttgaaagtgattcatgatttgtaggctaccagatcacaaaaataaacttaagcatttgcttgatagattttttttttaagttaggtttatgacacgtttgtgatattctcttactggagtttgtgcaccatttaacctaataaataagttggtagatcatggacagcattatcaccatcttctatcccacaaagaaccacaatgcactggaatgttttcctccggaattgtatttctactcttgtattcaaaaattttt

SEQ ID NO: 4976 - DNA, 254 bp, Bos taurus
  Clone ID: 27-LIB34-038-Q1-E1-G3
tctaaagtgagtcgtattatataccggacttacgtctggatatactttggtagtccaaggttggaactcagtttatccgtggtgtgtctggatgagaaagaataaggactattactgcaagggagcttattaccgatccatccatcgtggtcctgcaggagcgcatagctggcttagattcaggcacagccaatgtctgtctcttttgcgcctgacatacgatgtccacctcctgacggacaatcatcttctcc

SEQ ID NO: 4977 - DNA, 413 bp, Bos taurus
  Clone ID: 27-LIB34-042-Q1-E1-G3
gttctagatcgcgagcggccgcccttttttttttttttttttagaatcacaaaatcaaaatatttatttgttcttttgcacatgacagtgttaaaatattcctacgacagcaatactgccctccaggagcttacaatctaaaacaatcaacattaattgtagacccagtgattaaggcattatatcaaatgcagactttatatctttagacgtatcttctcaaggaagcagctggagagggcaggaccaacagtaaatgacatgaagtatactccctaccacctccccttccagcttctacagggaaccccaaaccagcgccccacagcctaaaagggaactccagagaaccctaccatagacgtagtgaagaaactttagtccctgattccctggtggacagaggactctgt

SEQ ID NO: 4978 - DNA, 249 bp, Bos taurus
  Clone ID: 27-LIB34-048-Q1-E1-G3
ctagttctagatcgcgagcggccgcccttttttttttttttttaatgtttcacctcagtttatttagttatttttttaacattcagcaatttttaacaaatagtgatcaagttttagacattgtgttggacactgggaagcctctatgactaagacacagtccctgactttcaaggttaatattttgccaaaattaagaaatcggaggtttgaacttaataaggtttttagattggcaccaccagggtt

SEQ ID NO: 4979 - DNA, 245 bp, Bos taurus
  Clone ID: 27-LIB34-051-Q1-E1-G11
ggcaacaactgaatgcttctctgaacttcgtatctttcccaggtgaaagttattgagataactctttcggataaaaagttaaattttgtacgttgtaagaaattaatgttaggagggtatatctgtatgacagaaaaggaggatttgccaaaaaagaaaacatagaatgtcttatttctacttaatgaaacgtgtgtatgggggtaactatatcacgacataatataaaacttggatgatgactt

SEQ ID NO: 4980 - DNA, 242 bp, Bos taurus
  Clone ID: 27-LIB34-054-Q1-E1-G3
attgaaatatggtgtagtgctgaactttaaaactcaaaggctgcagggatgagaggatgagagtagtgatgtttctgtgtagcttggttttcactattgtcttctgccgagccaagaatccttagacatctgttgttgccataatgacaaccacaagcagcgtgtgttgggtgcctgctatgagccaagctctgtgctgagccctttgtatgagcatcacaagctgggcttacatcaacaga

SEQ ID NO: 4981 - DNA, 127 bp, Bos taurus
  Clone ID: 27-LIB34-056-Q1-E1-G3
gccataccagaccgagcggtatactccaggctcttgtgaggctgacgtacaagttaatcatacgcactagtcagtaactcacgaccagtggcgagtacgggctcaaatgcacgctcgcaaatcgtta

SEQ ID NO: 4982 - DNA, 222 bp, Bos taurus
  Clone ID: 27-LIB34-057-Q1-E1-G3
ctggcatgttgtgactgaatcacacaattacataggatgcgtcccaatctgaaaatgcccagacagcaaatgacagaggtaaatggaaccaaacgtcagagccagaacagtttgagggagacttgaaactcagactccaccgtccagggggaaggtttcctgctgtgccatggactaaacgtgacagaagatgacagcaagacttctaggaacactgctgac

SEQ ID NO: 4983 - DNA, 395 bp, Bos taurus
  unsure (320): Clone ID: 27-LIB34-064-Q1-E1-G3
cttgatctgggatttacaggatgaagaactgaggaaataaatccctttcattaaagctgcccacctcatggtactttgttattaaagcccaagcagactaatacagatgacgaccagttggctttgcttatccttgtgtgtccccagtccaggactgagtaggcactcaataaacattggtcaatgagtgaatgaaagtgctgagagtcaggcagcagcactaagatcagtttccacctgcttattctctgcatggttggtttcagctgcccagagccacgcttttcatttctgggcttctgagacatgactttaggtcnctgtatttttcctggatgagacagcatgctagcacttggaactgatgtgtttgtatatggacgaagaacaagata

SEQ ID NO: 4984 - DNA, 217 bp, Bos taurus
  Clone ID: 27-LIB34-065-Q1-E1-G3
ttccaagaaaaatcattcgctttggggaagtttcttcttaaaggcgtggatggtctggtccttgtttcaggcctaaagaacaacgtacctcacgtgagatgatgccactcactgtcctgcagtcacagtatttgtatttgagaatcactttttttttctacactgtatggtaaaaggaactatgttaatagctatatcttaaatactgtgatttgag

SEQ ID NO: 4985 - DNA, 175 bp, Bos taurus
  Clone ID: 27-LIB34-066-Q1-E1-G11
aagtcaataaaacacaactcagaattgtaactttcagtatgtttaagtatattcaaataaactgaatactttggtatcttgggaaatatttgctttgaggataattctcattgtgataaaatagagcatttaaatctctaaaagacacctcataataaaatcctgttttccaagt

SEQ ID NO: 4986 - DNA, 242 bp, Bos taurus
  unsure (196): Clone ID: 27-LIB34-070-Q1-E1-G11
tggacactcaggcacacgggttcagggccctcacctgaaatggtgctcaccccttccctcctctcctccagcaccacctggtccccagttctcctggttcaagccctcctgcgtcctggggcctgggcggccttctagaccttgaacaggcagggtccagccacacccaggacccagcatggccagggacttccanggacatccagcagctggactccgagggagaatgaccaccaagctcg

SEQ ID NO: 4987 - DNA, 250 bp, Bos taurus
  Clone ID: 27-LIB34-070-Q1-E1-G3
ccgggtccacccacacgtccgcaaacactctcatgttagaggcaagaaccttcagaaatagccctttatacaaggcatttatactgaggaccagtctttaaaaataatttagcccaggagtttggcagtaattttaaaactctttgaggagggccatagctggaccctggtgttcctcaactttaagtgattttaaataatctcagagatagcttagaaggcttgaatctaccctggaggattctgaatc

SEQ ID NO: 4988 - DNA, 412 bp, Bos taurus
  unsure (333): Clone ID: 27-LIB34-073-Q1-E1-G3
atgttatagtgagtgccaaggccctgaggtaggaaaggatgacctttcaggaaacagaaagttagccagcatgggaacttccttcactggagccttagtgaagatcagatgtgtaaagactttataataaactcagcgagagagctgggcttgatgctgagagcaaagggaagtaattggatggtactgaaagacgtctctgaaaatatacatgttaagtgtggctgctatgtagaggacgcgttgtggcagggatgtgggcagtggggatgaagagtctgtgagttgttgggaggtagaatcatgaggcctagtgaaggtggcgactcctcnctcgtgctggcccgggtgattaggtggactgtggtataggttccagagatgggaacccagaaagaggagcatctttaga

SEQ ID NO: 4989 - DNA, 135 bp, Bos taurus
  unsure (7): Clone ID: 27-LIB34-077-Q1-E1-G3
tcattgngaaggaccttattatacttcccctcaacatacatgtgatggtgtattgtactcaaaattgtctacctgtatgtccactgtctgttatttcctcgttaaggaatgttacaaaaccctaaaattaaaact

SEQ ID NO: 4990 - DNA, 447 bp, Bos taurus
  Clone ID: 27-LIB34-081-Q1-E1-G11
attcaagggccgacccacgcgtccagaatgtaaaagatcattgggtttacaattataaggatatttttgaccatgattcagtaaggcagttgagaggaagagagaggacagaaattcagtaaactgtcagaagatattcaagaatgtttgaaaggtaaggaagtttgttagcaaaaacagactgttttttaaagcctagcaccaaaaacaaggaaggaaagcactcttaggtaaactatatactgtctgtactttattttctttttcaaggtttttaaaatttttttcatactttctaatcattttaaaacagttttaaacaatttttttgtaaacacattttcaagatgtaaaaacttacatttaaaaaagaataagctcttaggacatatgataatatatttatccctttatttgaaagttaattttaggacatagattctgaaa

SEQ ID NO: 4991 - DNA, 307 bp, Bos taurus
  Clone ID: 27-LIB34-084-Q1-E1-G11
atgctcaagtactgccacggccgcgaccgcccagcgccctacaagtgcggcatccgcagctgccagaagaactacagcttcgacttctacgtgccccagaagcagctgtgcctctgggatgaggacccctagccaggctgggacgaggggtggtccccgaggcagctgcccaggacccactgcccctcccccagccgccagagggggtgccccccacccccgacaacggaggccttagcgctcttccttcccatcacctaatcccggagcctctggctccctcacccgtgactgtgaaaaggggtgt

SEQ ID NO: 4992 - DNA, 87 bp, Bos taurus
  Clone ID: 28-LIB34-009-Q1-E1-G7
tgagtcgtcttactcttcctgtcgtccccttctctcgtctcatcctgtggccggtctgccccgcgttccgtggtcccctcgttttct

SEQ ID NO: 4993 - DNA, 437 bp, Bos taurus
  Clone ID: 28-LIB34-012-Q1-E1-G7
ttcgcgcgtcgacccacgcgaccgagttaggacataggcccatcttcctagtcagacgttggatcaaggcctgaatgtcatgggaattatgagaaacattcatatatttgtagctcgatagctctataatctcaagaatcagatttttattgaacgaacaagtaagaacaagcatttgcacactattaatattcggcatgttgctaattcaattcgaacacatggcacatgaatcatgaatacaacatagtccttgtgaaagagcagatttattcaatcgaggcatcagtgaacttggtataattccagagggacatagctaccttgatcagttcaggcagctcatcagccagattggtagtgctatgggctatgtacgaatgataagatctggtggccttcagtgtaacatcaatgctattagatttgtacctgat

SEQ ID NO: 4994 - DNA, 416 bp, Bos taurus
  unsure (345): Clone ID: 28-LIB34-014-Q1-E1-G11
attgcactgtggcatccactgcatgcggaaacgggcttctcaaaggcctctaagactttttctttctacaagctggaagcctggttaaggacctgcttgactgggaatccatttggtacatctgcttgcctcaagtctggaaagaaattggcttgggctcaccaagttgaagggacaaccaatagagcgaagattgcctgtaatactcacgtggccccaaggatgcaccgcatagtggtgatgagccaggtttacaagcatacgttggccaagagctcagatactctggtgggggcacatgtaaagatccatcgatgcaacgagtcttttatatatctgctctcncccttacgatccgtgacaattgagaactgcagaaatagcacctttgtcctgcgtcctgtacatactgctct

SEQ ID NO: 4995 - DNA, 421 bp, Bos taurus
  unsure (367): Clone ID: 28-LIB34-014-Q1-E1-G7
aagtttgtagggaatataaggaaaatctaagtttaatgtcatcattttaaggatgagaaactgagactgggcagctgatatagcttcttcaagatcacagaaattgactggcaccgctgggactcaaatcaggtctcctcagctcgtaagtccgagcctccatctccatactctgtggtttgctgagtcctgtgcaggctctgctgagggaccacagtgagtcatggtgatgaactggaagtgctccgccgggcccagtgagccaccacacaccctgggaaccggcaaggggagaagaatcactgaatcatctctttaaaatttacaaagcacttccgcacagattatttcatttggtcctcagtangtgtttagtcattctcactctaaggacaaaactaattcgcatttcatttgtttc

SEQ ID NO: 4996 - DNA, 414 bp, Bos taurus
  Clone ID: 28-LIB34-018-Q1-E1-G7
aggtcagaggaatcgtgaaaagactggagagagtaactgttgtgtcatcctgtaagcggtctgccgggcgcggtgtggcgtggtctttgtctttcgtgctgccgggccaggggcgacccggcatcgcttcagaaccttcaggaagagtctgcctgtagacccatggacctcaaccaccacgtgaaaactgtcatcttctctcatgaaagtaaaaagaaccaaggacatttttcactatgactttttatttctagtagctttgtttatgttaagcagttttaaaatataaattgatttttgaatgcaagtcaatctccaggggaaaagttaacaagtgatttttcatagcagaaaccattttgctgccacaaaagttttcatcaccagaactaacaaatcaagtgttccaaatac

SEQ ID NO: 4997 - DNA, 57 bp, Bos taurus
  Clone ID: 28-LIB34-019-Q1-E1-G7
tcataggacaacacaacactctagactaagtcatattatacttgacgatatgctaat

SEQ ID NO: 4998 - DNA, 261 bp, Bos taurus
  Clone ID: 28-LIB34-020-Q1-E2-G7
ggcgaaaggaaggagaccgtgacccttccaaccgcagacccatcagacatttgcgtgtcacgccgccgtaatgagaaaaaacggtggtgcatcgcaacggactgcagtcattactgaaggcctgcatgaccctcaagacaaacgcagtccgcaaattgcaccactacattaaaatgccagttagctgcgatctatcgatgatcgattgcacatggtccaatatgtacatgtacacgatctgcccatgcctcagcatgttca

SEQ ID NO: 4999 - DNA, 210 bp, Bos taurus
  Clone ID: 28-LIB34-022-Q1-E1-G7
agaaattaagacagcttaaataagacacaacgacacagacgattgacatgtgggatagcatgcacgaacgaaagagttatgtaggaaatacaagaaagcctcaggaagaacacactcctgagccctcaacttcatcagtcatcccaaaacgaaaatctgacaagaaacctctgcgtccaggtctccaggaacaggttccaccaccttcac

SEQ ID NO: 5000 - DNA, 386 bp, Bos taurus
  Clone ID: 28-LIB34-023-Q1-E1-G7
gaagagccatctgagtgtttgggtgtttctttctttttttctttaattttggagggcagggaaaaggagaccagggaaaagttgtggaatggagaaagaaaggggaggaaaagtcttcaagatgaaatattaaaataagtcactgggggaattccttgatggtctagtgggtggaactccatgctctcactgccaagggcctgggttccatccttggttggggagctaagattctgcaagccaccccatgcacactcagaaatttaaaaaaaaaaaggtcactgtcaccaggggttcatcaaacatagctgtatgaactccattctcagtgaattctgttgggacttttatttttctttaagaaatttttattcctcccaaggatt

SEQ ID NO: 5001 - DNA, 182 bp, Bos taurus
  Clone ID: 28-LIB34-025-Q1-E1-G7
gcacaggtccaggactcgcgggtcgacgcaagcctctaaattgagtcgtaatactcaactagtttacttttatttctcttctcagtcgcttcagctcggcctattccatcggtgtgtctggtgctcatacacaccgcaataatagggggcagcgggttcagcatttgtaacaatcacacagt

SEQ ID NO: 5002 - DNA, 54 bp, Bos taurus
  Clone ID: 28-LIB34-034-Q1-E1-G7
gtgaactgtgcggtcagcactccagtcgacatttagctgctgcatgaggcacac

SEQ ID NO: 5003 - DNA, 97 bp, Bos taurus
  Clone ID: 28-LIB34-038-Q1-E1-G7
attctagatcgcgagcggccgccctttttttttttttttggtggtggtttccactttactgatgtgcctctaatacctcccctttctttcttcacct

SEQ ID NO: 5004 - DNA, 311 bp, Bos taurus
  Clone ID: 28-LIB34-042-Q1-E1-G11
aaaaaacattcttaaaatctactgtttttgacattggaatttaagttgtgagataggtttaaatgtctagaatgcaactgataagcttttcttgaactgttttttttgaagtagagtttttttcatgtttaatttgtatttgtaaaaaaagaaaaaagaacaacaaaaatttccaaatctaagtaacacaaaaccagagcaaaactgttgtgccttctatttatctttgattccagtcttggcaattgtttaaagaaaataagaataaattgaaaaaaagagccctaaaagctagtggtgtgaaacgagat

SEQ ID NO: 5005 - DNA, 170 bp, Bos taurus
  Clone ID: 28-LIB34-042-Q1-E1-G7
agtaatggcagaatgctaacaagcttgcacttgtgtgagaggcactaggttgcgctagttccacgcaggccatgcctctgatgagatggtcacttttgcaaggaaggtggttgcgaatcacagtgtacgttctaaggatgagtttttgcccttcatcacataaatgcatt

SEQ ID NO: 5006 - DNA, 163 bp, Bos taurus
  Clone ID: 28-LIB34-044-Q1-E1-G11
aatgcattgcaagtgcagagtcttaaccactggaccagcagacaagttcctgtactttacattttaaaaatgtccctctagccatttggtcgaagatgcaatgcggtcggggggaggtccatttcgcctgcagacaggacagtcaaacggtgagtccagcagt

SEQ ID NO: 5007 - DNA, 421 bp, Bos taurus
  Clone ID: 28-LIB34-045-Q1-E1-G7
gacgccctttttttttttttttttttattgatgtataacatcactttatctcacgtccctcttcacaaaaataggaccatccttacatcagggatcccaccgcaaacatcgagatgtccttgtcattagcccaggccgttcccttctgggctagtcgccggaacaatcagcaggtgcacatgcagtatgcatgcctgaggcgtgactgctgttccaaagtgctacgcattcatcgattccagtcacagtcccttctaggtccggccttggggtttgtcagagggtgattatttttatggaggtcacgcagtagaatcattaggacagtttcttaatacatgctgtttttccaggtgttagttctgtggaatttcgcaaggttgtgaaagtacagtgttagaaattcccactacacacatca

SEQ ID NO: 5008 - DNA, 210 bp, Bos taurus
  Clone ID: 28-LIB34-047-Q1-E1-G7
agattgttccaaaagatgtgatgcgaccattagattccatattcgaacgtacagttctacgtaacatcaatatctgttgggttctaaatacctaagctcacaagttctaggtgctacctagcactagactctcgttatttcaataatctccccagaaatcttagcatcatcttgcatctaaattcgcctagcatcatgtatcagaacata

SEQ ID NO: 5009 - DNA, 348 bp, Bos taurus
  Clone ID: 28-LIB34-055-Q1-E1-G7
cctgaccaaggcccagagagtcaattcttctctggaagtagatactcatttgaaggatcagccatcacaaattgcaacaacagcccagcctgcagaggaggctacagctgttgatggcgaatccagtaacattcatcagctggctggttttttggaaaataccactcatgagcactggcccatgactcactctaagatctgggagtctgatgccttagccaccttaggggacggcaatgacagcccgtacctggagacgatgatgctccaaatggaggaaatggaaaaataccaggagacagttcgccaaagatataatacaattgtatataccgatcctcatttttg

SEQ ID NO: 5010 - DNA, 208 bp, Bos taurus
  Clone ID: 28-LIB34-059-Q1-E1-G11
gggcagaagtcaggagatgggtggtgtgtaggatcactatggccaggaagtaactagggtgaagagagcctagggtgtgggcagggtcccccaccctgtcggagagatatggaagcctatgtggtacccaacgggcttcccttctgctaactggggagggccctgagaggaagaagcccctcttagtctgtgaactcatgctgagggg

SEQ ID NO: 5011 - DNA, 209 bp, Bos taurus
  Clone ID: 28-LIB34-068-Q1-E1-G7
cagaacgccgttgtagccaagatggaagaccccctgagcggcagggcaccggagcccctggaaaatgtcattagcaacgcggtgcccgggcgtcggcagaacaccatcgtggtgaaggtgccaggtcaggaggacagccacaacgaggatggagagagcgggtccgaggccagcgactccgtctccaactgtgggcagtcaggaagcca

SEQ ID NO: 5012 - DNA, 224 bp, Bos taurus
  unsure (88): Clone ID: 28-LIB34-070-Q1-E1-G7
tgctatccttaagaaatgtttactgatccttcctccagagagcagagaatgtccagttagaatacctcaaccaaacagatttgagtgnttttattctcttccatgaacaaggtcttcaactcttccctatcccagagccaacattctataatagaataatggtaacaaggtcaagttctttcaggaatgaaaactcatatgacttttcattcctgaaagaactt

SEQ ID NO: 5013 - DNA, 361 bp, Bos taurus
  Clone ID: 28-LIB34-073-Q1-E1-G7
agcggtggcttggtccacccacggccccgcggacctggtgctgacctccgtggggccccagcacgccggcacatacagctgccgctaccgcaccggcgggccccgctccttgctgtcggagctcagcgacccggtggagctccgggtggcaggaagctgacccagtggccgactcgggtgctgatagtatcctcgggaagtcctttctccagcctgcctccgatgccttgtgctgcagcgggaagctggagttctccctgggagcagggggaatggccgcctctccctgatccatcccaggaactaataaatggtcagacagcctttaaaaagcaagaccaaaaaaaagggcggccgctct

SEQ ID NO: 5014 - DNA, 401 bp, Bos taurus
  unsure (272): Clone ID: 28-LIB34-079-Q1-E1-G7
aacactctatctgctgagcacatagagtgtttgcaaaacattcactatggagcatccacttcatcctgaggatgcattacggattgggtaacaaagcacagtctctccctcaaggactgttttgttttcatggaaaaattcagacattacataaacagagaggatgatataatgtcacgtacatatcagcagcttcagtcattatcaacatggggccaatataattattccctacgtcctaacccctttcctcttttgggtttgttttgtancaaatcttacacatcctgttattttaactctaagaatttttaaaaatacttaaaatggcatatcacacttaaaataaacataattctttaatattatccaatatcaattatttacccccctgctactgc

SEQ ID NO: 5015 - DNA, 376 bp, Bos taurus
  unsure (329),(352): unsure at all n locations; Clone ID: 29-LIB34-004-Q1-E1-H1
cgcattggcttcggccagtgtgcgggaaaagtgctgcctgccctgtcgttcgcctgagatcctctctgctctcccagaaacaccagactggcacgccaccctctccacctccctggggggaccaggggcccccactgtggctgtgggcctagttcttcattcaataataaagctgctaaaaataataataataataataaagctgctgtgctctgtcttcatgctgtgaacctggcacggctgtgcacaatggctactcatgttcttggtttgtttttgttctgttattttgttagtttgcttttttttttttcatggccacaccatanacatgcagaatttcccatcccanggactgaacccatgccccctgcat

SEQ ID NO: 5016 - DNA, 81 bp, Bos taurus
  Clone ID: 29-LIB34-009-Q1-E1-H1
accactctgatgtgagtcgtattagacaacactgaccgcagttagacttgaactttacactacagacgcactgggacttta

SEQ ID NO: 5017 - DNA, 204 bp, Bos taurus
  Clone ID: 29-LIB34-010-Q1-E2-H9
cacgcgtcggcaactatttcatttaattcttctctgatctttattatttcctgacttcagataacttggagattacgttgttccttttctaattttttgacctgcacagttagatgacttgggatctttcgtggtttcttagtacaggaacttgttgctacacaggcttacgacatctagtacctcatcagaccaggttggata

SEQ ID NO: 5018 - DNA, 429 bp, Bos taurus
  unsure (112): Clone ID: 29-LIB34-020-Q1-E2-H1
gtccacggacccgtccggggtcaggtggcagcggcagcagctgtgggtacctcaacggtgatggcctcctgcccggactcggacaatagctgggtgctgtgctggctcaganagcctgcctgtggagaccttgggccctgaatctgggaatgacccagaatccgagagagctccccgggcccctcagagcccctccagggcagctgctgaggaatcggctgggaccttggatggaggagagaccgtgtcccagaatgagagctccaaatctgggcccatcctgtcagaggaggctgatgccaagggtgtcctggaaggtgatgaccctgggagtggagtcccctggcccaggagacacagaggcccagggagacttggaagagaccctgatgtggtacgcctggaaccagactcacaggacctggagga

SEQ ID NO: 5019 - DNA, 86 bp, Bos taurus
  Clone ID: 29-LIB34-022-Q1-E1-H1
tctggggtctgtccctgagcccagtgactgaccaggcgaccttctttgaccccaggccatccttgtgggccgacggcagctcaatg

SEQ ID NO: 5020 - DNA, 362 bp, Bos taurus
  Clone ID: 29-LIB34-023-Q1-E1-H9
gggtccacgcacgcgtccgcagcttggggcgagcggctggcgggcgtgcgcggggtgctgctggacatctctggcgtcttatacgacggtggtgacggcagcggcgcggcgatcaccggctccgtggaggcggtggcgaggctgaaacggtcccgactgaaggtgagattttgcaccaatgagtcgcagaagtcgcaggcggacctggtggggctgctgcgacggctgggctttgacgtctccgagggcgaggtgaccgccccagcccccgccgcctgcctgatcctgaagcagcgaggcctgcggtcacacctgcttgtccaccatggagtccgctcggaattttatcagattcacacatc

SEQ ID NO: 5021 - DNA, 107 bp, Bos taurus
  Clone ID: 29-LIB34-027-Q1-E1-H1
gttgttcgacacaattctctagactaagtcgtaatagccagcggccgccctttttttttttttttttttgaaggtttgtagaacagcttatttcaatttctggttga

SEQ ID NO: 5022 - DNA, 425 bp, Bos taurus
  Clone ID: 29-LIB34-045-Q1-E1-H1
ccagcttttattcctaatcgcagactacaagactttctcagatcttatctttctcaagacacgtgctgtgttaatcacgtactcgtaaatgtcatggactacactgacataatccagatctccttgtctttaccccaggccgttcccttctgggctagtctcgggaacaatcagcaagtgcacaggcagcgttcatgtctgacgccaacctggtgttccaaggtccatgctttcatgatcccagtcatactcccttctgggtcgggccttggggtttgtaacaaggtgattatttttaagaaaaacacgcagtataatcattaacacagtttcttaatatatgctgtttttccaggtgttatttctgtggaatttcgcaaggttgtgaaagtacagtattagaaattcccacgacacacatcagc

SEQ ID NO: 5023 - DNA, 407 bp, Bos taurus
  unsure (382): Clone ID: 29-LIB34-047-Q1-E1-H9
gtttcccaagctttatttattgccaaaagatggggcagccctcgccagcggccgagtcgccctgccccgcccctcctttcgaagcttcctgcagtctgtgtaccatccagtgatggaatttgtgttctgttttctggttgattataaatatttactgcatactcttgcttgctctgggttgtttctggggacccgagagcgcagacatcttgcggataaggggatgaggcaccccctagccacgatgctgtgaagctgtgggcccggctgagcagaagggcctgtggaaatttggggaggccgggctcccgctgagagcagagagatccagcatggctagaagcagatatgcttaggaggcccaagtctccagcaggtagcncggccagcccctccactgtggggac

SEQ ID NO: 5024 - DNA, 354 bp, Bos taurus
  Clone ID: 29-LIB34-055-Q1-E1-H1
agggctttgcgggttgagatggtgtaactgagagattccatttcctggagaaggaggaggtgatgagggaagtgtttgctagctctctgattgtcttggcctgggtgaacatcagcttccatgttcaagtccgtgcttcagagcttctgcatccccaggttctgaggctgtcctgggtcacagggcaagagcacacacttcagtagttttctaggtatttatgctccaggatggtgtctgtgcagatggaagtcagtctctagctccctggctggataagtgccatggtgcagtctgagggtctcagctgaattccactcttacctccacaccgtgtcccccaccaaaggaaaa

SEQ ID NO: 5025 - DNA, 179 bp, Bos taurus
  Clone ID: 29-LIB34-055-Q1-E1-H9
cggtgcatcagtggaacagtttggcttagatgatcatcgcacgctcctcatggtctcagacagagtctctcattggtatccacagaataggagagaacaggatcgatccgcaacgacgcagcatcctagcagacaggtttgatccttagtggttaataactgtggtggagtgcagtcat

SEQ ID NO: 5026 - DNA, 225 bp, Bos taurus
  Clone ID: 29-LIB34-057-Q1-E1-H9
caagaaagaagagtaacccatgattccttttagtctcaccatgtcctcgggcaagactggaatctgtttcccatggatcaaagcagaaccaaacctacagtacgggtggcaggagggtgagagaggaaaggggaagtggtgtagacatgcatagggaatatttcagttatttacctatgtaggcaaatgcttctcttggaatccagatcactggggctgaagctt

SEQ ID NO: 5027 - DNA, 246 bp, Bos taurus
  Clone ID: 29-LIB34-060-Q1-E1-H1
aaaaaaaaaagaaaaaagaaaaaaatggattcacaaataagaacaaaactgatggaaaatcaataagcaaaactccccgctcggacccgcggacagccttggggactacacctgagagggggtcccactggcggattggcatagctgtgggcccgggtgctactggcgtgtctggacaaccccaggcagggaccctattgccgggggaccattctccgagacatggtgaactacgtcaaggaccgt

SEQ ID NO: 5028 - DNA, 317 bp, Bos taurus
  Clone ID: 29-LIB34-060-Q1-E1-H9
acgcggacgcgtgggttccggcttccagaaggaagtgctgtggctgcctagctaatgtcaaatggcaccggtctctacaggctgggcccttccctgacatgttctggcgtaagtctgtatagccacgacatgagaggccctgctgggctggcctggggcccagtctctgcttggtcccccagatgaggaggggcttcatttctgggtcgtcctcacctcctaacctcttgacccctcaccctcaaagacttctccattgtggttttgtaaagtgcagacttaagaatagaccgactgacatatgttttttttaaaaa

SEQ ID NO: 5029 - DNA, 354 bp, Bos taurus
  Clone ID: 29-LIB34-061-Q1-E1-H1
actacagccactgcctcgcgcacatctgccgggtccgctacggcagcgctgacgccaagcccgccaagaccgacatcacgctctcggggtttgcctctggcctcgtccgcgtgttcctgacctcacccactgaggtggccaaggtccgcctgcagacacagacgcaggcgcagcagcggcggcggccctcggcctcggggcccttggtgcccttggccgcgcctcccccctgccccgtgccccccgcgggtccgctgcccgggcccaggtaccgtgggccgctgcactgcctggccacggtggcccgggaggaggggctgcgcggcctctacaagggcagctcgggcctgctct

SEQ ID NO: 5030 - DNA, 419 bp, Bos taurus
  Clone ID: 29-LIB34-061-Q1-E1-H9
ccggatcgccccacgcgtccggcagggaccaacggggcgggcaggcaggcgagatgctgcggctgctggcgtccacctgcgccaggggcctgaggggtcgcgggggctcgcggcggctggtttcccggggccgaacgcgtccagtcgcgggactctgcgactccagccgccgcttgagccgccaggcttccgacgcccccctggaccaaccccctagtcccgagttcatggcccggtccgtggtcatctgctccatgatgccgctgccggtacaggccactccagaggggctggatgccgccttcgtcggggtaccgctggacattgggacctccaaccggcctggggcgagatttggaccccgacggatccgagaataatcggtgctgcttatgaccaccaatcctagcacaggagct

SEQ ID NO: 5031 - DNA, 215 bp, Bos taurus
  Clone ID: 29-LIB34-069-Q1-E1-H1
aataaataatatctgctatagttactattcaaagtataatagtttccctctcatctcatctctagcaagctgaacaaagagtcgttctgtttctttctctcctgtccaccttgccctttcctccccaccctccaccattccccatccacagccccgccccttccctacccccgcccctagcccctcccctccgctccccttacccctcctttccc

SEQ ID NO: 5032 - DNA, 301 bp, Bos taurus
  Clone ID: 29-LIB34-075-Q1-E1-H9
ccacgcgtcaaccgagattcgtagcgggtcttggcattaaaatgggatgttgactctgggcaagcccatgtacattatcatcatcgagtacatcggcggaccaacgagctcctgcaggcagtgtgcctatgttattgccataagattatgtccctcaaggaacagttagtagttaccattgacatctgtgactagaagttcaggacctgtctcccgtgaggtcacgacggagttcgactaggcacctcgaaagagttcggcgatgctgcgcatgcagcactgcacaatggcgttcacaagt

SEQ ID NO: 5033 - DNA, 134 bp, Bos taurus
  Clone ID: 29-LIB34-076-Q1-E1-H1
ttgagtcagccctatccacggcagagatgttttccgtgaaggaactctgcctggtcctgaatttggtgggggcaaattagacaagagatgggagtgattcccccagtggggactttttaactgaaaggaagagg

SEQ ID NO: 5034 - DNA, 324 bp, Bos taurus
  unsure (9),(20),(26)...(28): unsure at all n locations; Clone ID: 29-LIB34-077-Q1-E1-H1
ccgctcagngtcttctcgangttctnnngggcattcagctaaggcatcctcaaatcagatagatcagaataagaaagatgagtgcttcccagttccagctaatacgtcagcatcttttcttaaccaaaaacaagaagtggaaaaactattggaaaagcaggataggttaccatatcaaaagaaacaggtaaaagaaaaggataaaggtcctttctcatcatcttctgttgaaagcccggatgaattttggaggtaggtctgaagatccaagagatttttatgatagctataaaactcaggcaggtagttaccagaacagaaaag

SEQ ID NO: 5035 - DNA, 337 bp, Bos taurus
  Clone ID: 29-LIB34-078-Q1-E1-H1
ttaagcacctcctttcaaaattcgtttacaaggaattttttaactgttttaagatttagaaaaatgtcataccaagatgaaagctgatgaaaattatataaaagtaaatgggtaaatattgaaatttattattttaaatcagaagatttactaaaaaattattgaatatggtaaacagtgtttcacatggtgtgcatagacactagaatgataaacctagacctcctctgacttacataatcagataacaatgggcaaaatacaaaaattacatgaagtttatggaaaattggtaaatcaaatgaaagcaatatgaagtcacttttgtaaattgcac

SEQ ID NO: 5036 - DNA, 207 bp, Bos taurus
  Clone ID: 30-LIB34-004-Q1-E1-H9
aaagactgggaggtgagctgattctcagaggcgttcgggagatcccctgtcaccttccgtccgactaggagagtgatgtcgtcccagtatggcgtgagtggcgcgcaggtgcgagcatgcctcataggaagaataagccctttagagagaagaggatagctgtgtcatttcaactggtcgaacagagccagagagatccgttagcag

SEQ ID NO: 5037 - DNA, 159 bp, Bos taurus
  Clone ID: 30-LIB34-010-Q1-E1-H9
acgcgtggtccgacgcaagactctatagtgagtcgtattaatctactgcgatcgatagtcacacctgtatcagatgaggaaggacgatttcctagatcaagttctacctccttgaactataaggtcagagcggataacactcttcgatgcgcctaaacc

SEQ ID NO: 5038 - DNA, 426 bp, Bos taurus
  Clone ID: 30-LIB34-016-Q1-E1-H9
caacttcctgcggaagtcgacccaggggatctcgtactcgctgttcgccttggtgatgctggggaacacgctgtatggactgagcgtgctgctcaaaaaccccgaggagggccagagcgaaggcagctacgtgctgcaccacctgccctggctcgtgggcagcctgggcgtcctgctgctcgacaccatcatctccgtgcagttcttcctctaccggcactccgccccctcgtccgagcgccagccgctcctccccagctgaacgggacggccgagcccgggctgggggcggggccccggtctaggccagggaggcgccggggagcccagaactgcgagcccagccgcgccccagtacccgcaaaggctcgtgagctgaaaccctggctgactggctcctccaggaaaacggggcctggcccggtc

SEQ ID NO: 5039 - DNA, 400 bp, Bos taurus
  Clone ID: 30-LIB34-018-Q1-E1-H5
agccattttgggccttctacttctgtacatggtatatcttactctggttgagcccatactgaagagacgcctgtttggacactcacagttgatacagagcgatgatgatgttggggatcaccagccttttgcaaatgcccatgatgtgctggcccgctcccgcagtcgagccaacgtactaaataaggtcgaatatgcccagcagcgttggaagcttcaagttcaagagcagcgaaaatccgtctttgaccgtcatgttgtcctcagctaattgggaattgaattcacggtgactagaaagaaatgaggcagacaatgggaaaaagattgactgagttttcctgggttttgttttaataccctgttgattttgccaactcttgctagaaaattcaaaact

SEQ ID NO: 5040 - DNA, 394 bp, Bos taurus
  Clone ID: 30-LIB34-022-Q1-E1-H5
ctaggggcctgccggaaggcgaaggccggcgctgactcggcgggcgtgtgcggcgcgggtctggccggggctgcgtcgccatggagcgggacggggatcagctgtccgcgcggcccaccctcgagaccgaggggctgcgtttccttcacgtcacggtgggctccctgctggccacttacggctggtacatcgtcttcagctgcatccttctctacgtggtgtttcagaagctttccacccggttgagggccttgaggcagaggcacttagattaagctgccgctgctctggaacctgatattgttgttaaacgacacgaggctttagcagctgctcgtttgaaaatgcaagaagaattaaatgcacaagttgaaaacataaagagaattaagac

SEQ ID NO: 5041 - DNA, 315 bp, Bos taurus
  Clone ID: 30-LIB34-027-Q1-E1-H5
aagaggtagtgatgcaggccaaggacacggcacggacacacgtccacgactccagaaactcaggttttaagaactgcttggggctgactacaaggcaggattttccccgagggtgttgtccttcagaagtgaggtcatccctttgcatttgggttgttacaggtttcatagcgtggagcctcactcagttctgtagagcatcagagtactgcttgaggaagacacatttacctaaacagccctaatcagtactctggtggaacttccacgggacgggggagtcaaagaatcatgacgatgtgctcattatccctg

SEQ ID NO: 5042 - DNA, 142 bp, Bos taurus
  Clone ID: 30-LIB34-028-Q1-E1-H5
ggggccggtcgggcccgcccgcttttcccgtgcaatctcgggggacgcgcgcaaattttgattttccaatctggaaccagtatccagatcaccatggcaactggagagagggtgttcagaggtagtagagtttttggaattg

SEQ ID NO: 5043 - DNA, 420 bp, Bos taurus
  Clone ID: 30-LIB34-029-Q1-E1-H5
aggtgatatgattgaccctcatgacttttctgtttgctgggattaggtctgcattatatccatggatacacgtttaatgatgatgaattatacaaatcccttaaaattaaaaatcaaaaatttcccatgggatagagacatatttcagtctcaagtataaaaatttttaactaaatagaattaggttatatcattcattcatatgtgtgtggttttataatagtacttttcaaattaaaactgatttcaatttgtactattattgtatgaatgtaattttattttttaataaccacactcatgtatggttttttattatcccatatgagtgattatgtatgtatgcataggaatgctttgttcaaatgtattttggattttcagtaatcatgaatcaaatcttacctttatgtataaaaa

SEQ ID NO: 5044 - DNA, 356 bp, Bos taurus
  Clone ID: 30-LIB34-039-Q1-E1-H5
atgatgaatgcaaccttaatcgctgagctcttttcacaatatttcaattcctgcccagttatcactataccaggtcgtacatttcctgttgataagttttttctggaagatgcacttgatgtgacacggcatatgttgcaagatgggagcccatacgcccgcaccatgctacacaggtcaacagataagctcaaagccaagcgcaggataaccgcatttgaggatgtggacgaggacctgcgtcacgccctgcacctccatgatcaggaatctgtcaaagatgcgataccagatcaacatatacatttcaagcaacaccatgcactctatcaacgagttagcacatcattcatcac

SEQ ID NO: 5045 - DNA, 302 bp, Bos taurus
  Clone ID: 30-LIB34-042-Q1-E1-H9
aatcaacaagctgtcaaagaatgatgtaatgggtacatccgacatgggcccacaacacgtctcctgaatagcatcaggatggtcaactgccttacctcaatgcacatcatcgtcatcaatactaaaccaagacaagagactgtcaaccgtgaacaccgatacatatgatctacacacagacaattaggatccaatgtcagtcgtcgacataaactttgtgatactgaccacatcacgtcctcacacgatacaacctgcaaggctcaggtgcacaagctatcaagtgagtcacgagagggact

SEQ ID NO: 5046 - DNA, 93 bp, Bos taurus
  Clone ID: 30-LIB34-049-Q1-E1-H5
atccaattctagatcgcgagcggccgcccttttttttttttttttttttttttttttttttttttttttttttttttttagtttttttttatt

SEQ ID NO: 5047 - DNA, 228 bp, Bos taurus
  Clone ID: 30-LIB34-051-Q1-E1-H5
cgcattcctgttcctggctctccagtagcgcttttagtgcgtccgggtccccggttctcccagccaccagtgcgcccctgttcgcatccctgtctgcgccctctggggccccgccgctgccgccctggcgcttcccgcgggccccggcgaggccgcctgcgccctgtgccagagcgcgccccgcgacccggtgcgcgccgactgcggccatcgcttttgccgggcgtg

SEQ ID NO: 5048 - DNA, 314 bp, Bos taurus
  Clone ID: 30-LIB34-056-Q1-E1-H9
gtttgctactcacaaggtacatcaaactatccacccaacttttcactccgtctaccttgcgcacgttatctcctgctcagaatcgaaaatttccgcatcattggccatgttggagaaagctttaacaaacgtccacatgatgctctaacataatatcacattgttcaacaatatggagatcatattcacccattctgtctccagcactgcaagcctcctcatttatatcttgctttgcgcgtgatgataacacaaggtctacctgggacacatcctctctaatacttacaacttcagttcagtcgactattctg

SEQ ID NO: 5049 - DNA, 195 bp, Bos taurus
  Clone ID: 30-LIB34-059-Q1-E1-H5
tgtttgtgtttcacacagacaggaagggatcggccaagggcacgggacacagtgcgggtgctggtctgcattgagtctctgtgccatcgccacatgtccctggaagccacctccagcctgaatagcagtggcagcgtcgtctcgatgcacgtgcaggggcatgctgcagctgcaggctggcacagttagaccatc

SEQ ID NO: 5050 - DNA, 235 bp, Bos taurus
  Clone ID: 30-LIB34-060-Q1-E1-H5
gtttggataggaatgggttggtttctcaagtaggacagtgtacttgtactttaggaggaaatactcaagagagtaagggagaagatgaatggggatttcactttacacggcttaggacaacatgactctcaataaatgaagctaaaatttctcctggatcccagaattcaaaccatatttaaaccgtacagtagttgaattatacatttataaatatggtttgaattcaactact

SEQ ID NO: 5051 - DNA, 227 bp, Bos taurus
  Clone ID: 30-LIB34-064-Q1-E1-H5
ccccacgcgtacgaaaaaattcagtgtcacacacacctgaagtgtcccacaatcacacacgttcaatgtcacacaaggggacaatgtcacaatttcaaaatgtaacaatcacacaggcaccttcatagtaactcaatttcacagtcacagtctcacacactcacacaactctcctcctcccctctcttcctcttcccctccccccctccaatcaacaagtctggcaa

SEQ ID NO: 5052 - DNA, 192 bp, Bos taurus
  Clone ID: 30-LIB34-065-Q1-E1-H9
ggccaacctggtgcccaacaacattataggcatgcacttgcggatggcattgtcattaatatctatccagaccctggctcttccactgagactctgttgcagagggcatttcggttataacgagagagacatttcacagctatatgccttaaggatcatactcgtcagcatagtaaaggacaacgctcacat

SEQ ID NO: 5053 - DNA, 233 bp, Bos taurus
  Clone ID: 30-LIB34-067-Q1-E1-H5
gacagccctgaggctgcgggacgtggaccatgtctgcttgggcagccctcctgctgctctggggtctgtccctgagcccagtgactgagcaggcgacgttctttgaccccaggccatccctgtgggccgaggccggctcaccgctggcaccctgggccgatgtgacgctgacctgccagagcccgctgccgacccaggagtttcagctcctcaaggatggcgtgggccaggaa

SEQ ID NO: 5054 - DNA, 350 bp, Bos taurus
  Clone ID: 30-LIB34-071-Q1-E1-H5
aggagtgtgaaccacgcagagttggggagagataaactataaacttatttattgcagcaatagaaataccttgtatttggacatatctttattaagttctaaagtgctttctcagagatgatttcatttttaacaagtaggactcaagagaagagaggtggaaccatgtgagtttgtccatctgcttatattcatacggccagctagtctcaaatcacatgtacacaattttattaatctccaaaacctaatctgattatgagatctgagcttagatgcacaaactttggacaagtttttggacatgataagcactacagagtatggctcacggtgaccgcatcgattca

SEQ ID NO: 5055 - DNA, 414 bp, Bos taurus
  Clone ID: 30-LIB34-073-Q1-E1-H5
aatttaagtgcatcagctggtaggttttgtcatttagtcagaatccccaaaataaatcaactctgctctaaactttgtttccggccaaacactaggttggtacagtaggcctttttaaagacaaatttaactcgatctgttgttatttctacttaagtaaaaatgagttttcaaatattttccccaagagaaacataacagactatccaaaaattttcaaagaagaaaaaaatgtagttagagttccagaggagctttaaaacatggagttgacaaattcacatattgacttatgatcttaatgagcagggatccatgctttttatttacttgagaacattttggttattaactatttctattttctaaatatacctgtgtttataaaatttaacaatgtttaacaagccttgt

SEQ ID NO: 5056 - DNA, 248 bp, Bos taurus
  Clone ID: 30-LIB34-074-Q1-E1-H5
agagggcagcagcgacttccatcgtaccgcctgcaatgggatcgatttttcctgattcaacatatagtggaaagccgtgatatacaccacctcatgacatcgacagttgcgtacacgcaatatatagatagaatcgatgtgcatcaatggtttagagtgagtaacctttacatgtatgataattttgcattttacagtgctgcatgattatcacgatttactgtggcttgaaacgtttcctcgcatca

SEQ ID NO: 5057 - DNA, 448 bp, Bos taurus
  Clone ID: 30-LIB34-075-Q1-E1-H5
ccgggtcgacacacaagtctaaatggacgtctcagtctatcttcctcccttggcgcatggcgcgatgaactgggagctgctgctctggttgctggtgctgtgcgcgctgctggcactcgtggagcatctactgcgcttcttacgtggcgacgcggacctcaccctgcagtgggtcgagtgtcaagggcgacgaccagaatgtgagctgactgatatcgtggtgtgggtgactggagcatcaaatgggattggagaggaactggcttaccagctgtccaaactaagagtttctcttgtgctgtcaaccataagaatgcatgagttggcaagggtgatcagaaagtgccttgagaatggtaatttgaacgcactagatatactcattttgccccttgacctgactgacataagttcccatgagatggctaccaaatcagttcttcaggag

SEQ ID NO: 5058 - DNA, 335 bp, Bos taurus
  Clone ID: 30-LIB34-076-Q1-E1-H9
cgacgcacaagtcagttttgtttcgttttattttttttcatattccacttggtttttttattagaagtttatgaacatggcgtcgggcgggcatcttcttcgtcattgctactctcgtcttcgtcgcgatggttgtggtatcgatggccgaggcagagtctgctgatgcgtcctccgccgacgctcccgcccccgctgctgatgcacctgcctgttggacctagcggacaggcgggtgcacctgttccccagcgcgtctagggtcgatcgggcaatgaggacgacgatgatgagtcgaccatctaatgccaagcaggtcggtccggttgcgtttg

SEQ ID NO: 5059 - DNA, 440 bp, Bos taurus
  Clone ID: 30-LIB34-078-Q1-E1-H9
tggtattgatctcaggatcgcagtccacacagggtttatggctttttcccttcatgtcatcctctcctgtaagcatccgttctagtgtgttgactccatgtctttgaatatgaatgtttccttgaacatgctctgctgtctgtgtgcatatactttgcccacatgtaatataatcccgttgatcttgccctgctgcttttctcactcaacatgggttgcttaggctacatcagctttatttctttgagctgctccaagatattccatggtgggtgttaagtgcattttttttagacatttgctaagtggtagacacctgggttacctgcaactcctcggcccacaggcaaggccatggtcatggtgaacatctttttctatgtctccttccatacttatgtaaagttctccagcagaggtagccaggatggaattatgca

SEQ ID NO: 5060 - DNA, 406 bp, Bos taurus
  Clone ID: 30-LIB34-079-Q1-E1-H5
taaacactggcttcatcaaaaacccaagtaccagtttgggacccaccctggaacctgaggaagtggtaaacaagctgatagatgggatcctgactgaacagaaaatgatctttgttccatcttctctcaactttttgtcattgatggaaaaggtccttcctgagcgtttccaggcaattttaaaacgaaagattgatattaggtttgatgcagttattggatataaaatgaaaggaaaataagtgcttaagtttcttaaaaactgatttaccaggtttaggttgatttcatctaatattagtgagaattttaatgtttttaaaagtatctgcttttcctaattaactttttgtttttcaatatcatcttttgaagttctggcaggtcctaatttcatagaatatac

SEQ ID NO: 5061 - DNA, 429 bp, Bos taurus
  unsure (390),(398),(410): unsure at all n locations; Clone ID: 30-LIB34-082-Q1-E1-H9
agcgcctgttctttgccggccccgtttccgctcctcgggtcgttctggcctctgggcccgggtacctcagtactttccgccgtacccagggactcactcctcattttgactctctccggggctcggagccaccggcggtgcgtcttggtggcgccgcccgggccgaggcctgccgcgccgcggcgagttcgtgcagacctgaccccgcgtctccccagctccgttgaggccgccgcctcggcatgccccggctggggtccgcgccgcgctgggcggccgccgcgggccgttggggctgcaggctgctcgtgctgctgctgttcctggtgccgggccccggcggcgcctccgagatcaccttcgagctgcccgacaatgccaagcagtgtntctacgangacatcacgcanggcaccaagtgcaccctcg

SEQ ID NO: 5062 - DNA, 408 bp, Bos taurus
  Clone ID: 30-LIB34-083-Q1-E1-H5
aggacgcgtgggttttcttttaactaataggccattagactacttatcaaaattacagtaatagatatactctaacgaggtgaaaaattgtaggagttgtacacaggcaaatatccttacaaattccccaacaagattactctccaatgctcaaatctttctttcaaacaaatttttatgtctttagctcaagactccatttttcaattcaatagttggattttgaaacgtagcccttcagcttaagaagttttccttcatctctattgaaagatgtcccagcattctcactgaaaacattcctttggatagagtttcacaaattgagtatgggctagtggtcagtgggcttctctccccaaaaactaatttttcaacatattgatccatggcttaaatgtttggttg

SEQ ID NO: 5063 - DNA, 405 bp, Bos taurus
  unsure (362): Clone ID: 31-LIB34-006-Q1-E1-H11
gccgtgccgcagccgctcggtgaggacccgcgaggcctcggcgtcccgcctcggaacaatgggactcggcgcccgaggtttcctgacgttgctggccctgggggtcgtgctgggggtggcgctgctgaaggttttcacggacagcgcggaccccgagggatctgtaagtcagaagaatcttatgtctgtagaaaattccaatgataaccaacaaggaactgcagacaatgattctaaatctccagaaaactccaaggataaccaaggaggatcttcaagccagaataatcctcagtctgaaagaaactccaatggtaacaaccaaggaggacctccaaaacagcagaatcttcagtctgcangaaactccaatgataaccaaggaggatctccaaaccagaataa

SEQ ID NO: 5064 - DNA, 305 bp, Bos taurus
  Clone ID: 31-LIB34-006-Q1-E1-H3
tctacccaggcgaccgacgtcttaagaagatgcagcacatctgaagcgtaaagtaacaagaagtgccaaaatcgatagctgatagccaatccaactgatgtccatttctgttggtgtaaagaaaaattctcacaattcaaggtagatttcagtatatatattgcatcattagcttaaggtacagtgaaaagtaaattatgagagtctagacacgcgcaaacacacacggcagaagttcgatacaatctaggggaattataagcggttatgagatgttatcagtcatctaggatgtcacctaaagg

SEQ ID NO: 5065 - DNA, 260 bp, Bos taurus
  Clone ID: 31-LIB34-007-Q1-E1-H3
gcaatctcttggataattttatcgatcacttgatttctctcttatttgccagtgcacccctccccactgagggaccgtgatgggggctctggtcaccggctatgcccaaaggaacgcagtctcctgctctccttcccctccacagacgccgggatcctttctgactgcaaaccggtaggtgtgcagggtctcaggagcttgtagcttagagacctcctgttcacaagggcatagccccaggatcactcacggtctttcac

SEQ ID NO: 5066 - DNA, 425 bp, Bos taurus
  Clone ID: 31-LIB34-008-Q1-E1-H3
atctcttacagcagtattgcctgttgttgtacagatctggtatttggaggctggaatcataatgagcccttgcatccctaatacttgactgaggttatttttgtgttatagcaaatgtggcaggctctttttggcaaaaatttttaaaaagtatttttggtattattctgaaagaaaagatgttaaagtttaggggatcttacatataattccatactacatgaactgaatgaggctatacattgtggtgtttgattaatttactataaaaaattcagaacatataaatgacgtatgattaagtacttatattttgcagtctgtatggattgagataattcagaaataccaaccatagaaatcttacctagttggctaacgtatacgctgtaatagtgaaactataatatgctgggtgttttttt

SEQ ID NO: 5067 - DNA, 262 bp, Bos taurus
  Clone ID: 31-LIB34-009-Q1-E1-H3
aaaagaaacagtcaaacaatgtgggagcttcaaaccaccaccacagaaagtccagaaaaagggaatgagcaatcatcgagtatacaaagcccatgtgggctatcctttcttcaactgcaatttatggtaacttatttagttgatgatcctatctgatgactctctcacggcaagcttcatatctgagctggtatcactaaggaagcgttgacccatcactcaacatggcacttgagtaaggaaaggattctataaaccagac

SEQ ID NO: 5068 - DNA, 275 bp, Bos taurus
  Clone ID: 31-LIB34-020-Q1-E1-H11
tgcagtggtcgactctgtcattcagagcagtacaagtactcataaactcaacgccattgtcgcctttgcctcctccattgaagaatgacgagagctcagtcctctgcatgatccgctgtgtcacatctgcaataaaaactgtaatgggaactggtcctgaggtataatatgctgcaggatgataggtacgggaaatggtgcaagcatgtgcaattacatccgactcagtatcattgcaagcatcatagcccactacgatcttcatgaccatagac

SEQ ID NO: 5069 - DNA, 339 bp, Bos taurus
  Clone ID: 31-LIB34-020-Q1-E2-H11
tgcagttgacgacaccgtcattcagagcaatacaagtaagcataaactcaatgcccttgacgccaatacctccgccattgaagaataacgagagcacagtcccctgcatgaaccgatgtgtgacatcagcaataaaaactgtaatgggaacgggtcctaaggtataataagcagcaggatgatagtcacgggaaatgtaacaagcatgtgcaattacatccgactcattatcattgcaaggatcatagcccactacgatcttcatgaccataaacttgtccagatcacaatagtagcatgggctctgactccggactgcatgggactgttcaccgacac

SEQ ID NO: 5070 - DNA, 429 bp, Bos taurus
  Clone ID: 31-LIB34-021-Q1-E1-H11
ggccatggaaggccttgaaccctgccacctccgcccctcctgggataaggttccaacaccccacggatgggcccagggcccccctgcaacttctccaccgccgcccaccggtgcaacgtgggtggcctaccggctgcagtgatcatcatcccaaccctgctctcctcgtcgtctctcctgatcatcagcttcatcttatggaaaacttgccgccggttgtcccgggtcacccagccccgcctgccatccacatgaggggcccaggaatctgaattgtggaatgtgacacccagaaatggagctgagttatattaatgcctgggaacctctgctgctgaggcccctggagctaccctgctcctttcaaagacccattcatcaataatccttttgattctgaaagtccttgcaatcaattccccaaacttt

SEQ ID NO: 5071 - DNA, 361 bp, Bos taurus
  Clone ID: 31-LIB34-023-Q1-E1-H11
catgaatttgtgcctggtgagcaggtggcccaaaatggaagggtccatatactgttgttctaaccacccctacagcaagtaaagttgcaggtgtcactccctggatccaccacgtgagggtgtagagagagcataccatgcagacacagaggatgccaagtggactatacaaaaggaccccactgacccctgtgaaaccaagatcatcttaaagaagaaaaagagatgaagctctacaatcaactgctgctacaaggacttgccggtatcatcttgagactaaccatagttttggcacaaggaatgacctgtgctataattaaagttgaatgttgtgtatataagaaaaacgggcgactac

SEQ ID NO: 5072 - DNA, 406 bp, Bos taurus
  Clone ID: 31-LIB34-026-Q1-E1-H11
aaagaattctatgatgggaaagaattctgctgtctatagtgctttccttcaatgtgtataatgttaaaataaataattttaaatatttgtttgtttccatgattacccaacctaaatcagacagacttgcagggctttaacttcttatttctgttgtcagaagctcgtgttggcatatatttgctctgacttgaactggcattcattaaggcatctggtcatttcagttttcaagaaaatgacgttaaatgcaataattttatttatcacaaacattttatacgtcattgttttcttttagatggtgttgtaatgttttacttatttgtaatttatattgcatgtataaacataccgaaaataagctaaaatggcaaatttgttttacattattataatttgtgag

SEQ ID NO: 5073 - DNA, 181 bp, Bos taurus
  Clone ID: 31-LIB34-027-Q1-E1-H11
gggtcgagccacgcatccgcggacacatgggcggacacgtgggctgcgtccctcacaccggcgcggtcagtaccaggtccggagtagatgctgccacagctctcgtcgcccgttcgcacacatttcggtggcaggtggcgaccagcaactatctctgcgccagcagttcattcgcatggct

SEQ ID NO: 5074 - DNA, 308 bp, Bos taurus
  Clone ID: 31-LIB34-031-Q1-E1-H3
ctgggtcctgaaagctccaggggtaaaacaatatcttgtaccctatagagtactttataaaccatgatccagccaaaccaagcccaggcccacagaaggcctttatcagcaaatagtggagccttcactttttctgtgcctttggggataggctgataatctataattttcaaaatagagactataatggcctatgtgtattttttcctatttcccattgaaagcacttacatgatttctgccacattcacaaaataaaacctttctttccacagcaaaaaataagtaagggaaacaaaaccataatg

SEQ ID NO: 5075 - DNA, 223 bp, Bos taurus
  Clone ID: 31-LIB34-033-Q1-E1-H3
acatgtagatatgtcatgaactgagtgaagtggctgcgtttttgttttgggttgtttttaattcggctttttctttttccacccttggttttgcatctgtataagagatatgagatggtacactattcgaatcagaaatctaaagttttgtattgggacgagaaattacttagcgagatcgcgaacccctcaagcccaagctgaatctgcttgggttgagagc

SEQ ID NO: 5076 - DNA, 392 bp, Bos taurus
  Clone ID: 31-LIB34-035-Q1-E1-H11
agtcaggctctggaaatcatccggggttgtcaaggcctgaatgtggtgggttgtgacctcgtggaagtttcaccaccctacgatccttctggaaacacagctctggtggcggctaacctgctgtttgagatgctgtgtgttctccccaaagtgacagtcgcctgaaccttgtcctgtgattcttcaagatgaaacaacagattgcacacatgataactctccagaagcacttgtgtgcaagcaaaatctaagaactgaagagctgatgccaataaaacattctgctaaaaacgtcattggtgggtataccatcagggcattcagtgaaactcgaatccaaacagccaatattcctcatgaatttgaattaacttaagaactaaagatgcact

SEQ ID NO: 5077 - DNA, 391 bp, Bos taurus
  unsure (341): Clone ID: 31-LIB34-043-Q1-E1-H3
ctttctttcttgtccctagacctgtccctttctcaggcccacgtctctcccactcctcctccgcgcgcgggacaagcgcgggcttcagcgacgggagccctcgagggacatggcaactccagccgcgccgactggcggcgcccgaaacggggccggcccggaatggggagggttcgaagaaaacatccagggtgggggctcagcagtgattgacatggagaatatggatgatacctcgggctccagcttcgaggatatgggtgagctgcatcagcgcctgcgtgaggaagaagtggatgctgatgcagctgccgctgaagaagaggatggggagttcctgnggatgaagggctttaagggacagctgagccggcaggtggctgatcagatg

SEQ ID NO: 5078 - DNA, 416 bp, Bos taurus
  Clone ID: 31-LIB34-044-Q1-E1-H3
acaaactgtaaaccagtgcattataatatggtagtcaaggttgtgtatttgattcaagataacgaaaaatcttggaatgaaaggcagacactggttaaccaagttgtacacattgtaccacattcactgtaactttaggaagaaattccactttgtggaacattctcaagagatctgagattattcacgtaagaatcgatatattaaaatgtacatatttttactttatattttgatgccaactgattatactagaagtaatagcacttcaggtggtagttactgaacacaataaaggatattatactgataggttttaaattctgttgtttgaaaatgctcttaactaaaaagccctatatatgtctattatttgatttcatcatatcatgactgtttacgttctttaattggag

SEQ ID NO: 5079 - DNA, 435 bp, Bos taurus
  Clone ID: 31-LIB34-050-Q1-E1-H3
acagaactgccaatcggggcctagtttactactaaggaactggataaacttaataaaataagaatgatactgaaagtgctgatatgactaatattatgctatagttaaatgacttaaaatactaaacctattaaccttttccacaaacacattataatgtttttcataggcaagtttcctcttgatagcagtagcaacatttttaaatattcaaaactcttgtcaagtaatcatgttttccatttataacaattttcttatcaaaacatgttgcttttaaaatgtggaacagctataatcactttattttatgatagtatcttaattaaaaataatactactttagcttgggctatatgtgtcagggtttttctccaggtgcttatattgatctggaattgtaatttaaaaaacaatgcagacttaggctagtac

SEQ ID NO: 5080 - DNA, 247 bp, Bos taurus
  Clone ID: 31-LIB34-051-Q1-E1-H11
aaaaaaagggcggccgctcgcgatctagaactagttgcgctttcagaaaccctgcttgtcaagcgtgtctcgacaagtggtgccgaaatagggacccgaaagtaaatccagcctgagaagctagttcctagccgaggtgaacgtagggaaatctggccagctaggcggaagaggaaagtacttggctctggctcaattttttctgcgctgaggcataaggaacctgagctatttggaacccctggaa

SEQ ID NO: 5081 - DNA, 241 bp, Bos taurus
  Clone ID: 31-LIB34-052-Q1-E1-H3
gaaaagcttccaaaaggcacagttgaagtagagtaaattctaatctaaatccttgagtaaaaacaccttaaacattttttcatctcaagaagtggtttgtatatgcaaggttgtcatttctggagtgttatattttatggatgaaaaaagccccagagatctttgtaattttgctgcagaggtattgcacctcattcacatgtcatcactgttggggatacaggggtgaagtgctgtgaat

SEQ ID NO: 5082 - DNA, 241 bp, Bos taurus
  Clone ID: 31-LIB34-054-Q1-E1-H3
atttcagataacatacacctggaggcatttaaccatttgtaacattaacatgttattagaactcaattattggattttcttcagtgcaaggctttggttgcggaaatatattgattcatgatccttgagttctctagggaacaaaaattcctctaatgactgttgctcagagtcctacccctttctgagttctatccatctcagtaaaaagaaaactagatgcagatggcctataacaccc

SEQ ID NO: 5083 - DNA, 230 bp, Bos taurus
  Clone ID: 31-LIB34-058-Q1-E1-H3
agggacagaggagccaggcaggcataagtccatgagattgccaaagagttggacatgacttagtgagtaaacaacaacaaaattagagctagaagctgatgggtaagtgataaaatgaactgtctttaatcagtttgttcttggatacctaagacatacttagcactttgtaaagtgtactgtgtaaaactgatttggggtatgtaggaaagatgtcgagtgccaaatct

SEQ ID NO: 5084 - DNA, 205 bp, Bos taurus
  Clone ID: 31-LIB34-059-Q1-E1-H3
agaaacgttatatggtagtcagattccccccctccccttggataaatgatggccagggaaattaagtgcccttcttaaagtttccaaaagacgaggtagactgtagtcaacagactacaatccagatgagattaatattaatttaaaaccgtaaaaaagaaatgtaatttttaaaatctcagttataatcctcctatataatttg

SEQ ID NO: 5085 - DNA, 204 bp, Bos taurus
  Clone ID: 31-LIB34-062-Q1-E1-H3
tcgacccaagcgaccgctaccatatctgggcgggcgacattcgctggtctggcggagcgcgggggcgcgctaagaccgccaggcgaacgggagctgctgggtccccggctgctcgcgcctcagacgtgacaggagacacgccagtcggtgcatccagtctaacgccttccgcctctaacgcataaatctgctctcatgaacttc

SEQ ID NO: 5086 - DNA, 359 bp, Bos taurus
  unsure (156): Clone ID: 31-LIB34-064-Q1-E1-H3
ccaagaagtcatttacaaacatcattacatgggaggctcacaggacctggtgtaatgaacacagacccgcacctcacgttttatatacaccaatgtctcatgtaaaaatatatacttaagaacaacacggcatcttgcacgggaagagtgcatganggctgctcagtgcgcactgaccgcgccatccaaatgcgcggctcaaggcctcagccctgcgccagcagtcgcgccctgcagcgctcccgcaaccggtcgatgctggccctggacaggctctcgggctccaagaatatatctctgcatgaagctgtggcactcagtgacgaagcggcccctggtgatctccttgaacttctcac

SEQ ID NO: 5087 - DNA, 261 bp, Bos taurus
  Clone ID: 31-LIB34-066-Q1-E1-H3
actctgcgctggacacctccctggacaggtccttctccgaggatgccgtgactgactcgtcggggtccagcaccctccccagggctcagggccggacgtcaaagggcacaggcaaacggaggaagaagcgctcctccaggaaccaggaagaggttgcccccgaccctgacgataataaaacaaaaaggctctgtgtgatccagtgaggcctcaggcccaggtccagagccaagtgaggagccacggcagggctgccgggcg

SEQ ID NO: 5088 - DNA, 227 bp, Bos taurus
  Clone ID: 31-LIB34-067-Q1-E1-H3
gcggctcggccaagtccctccagggctgaccaactggaggggcctccgggacctcactgggtctcacagcgacagaagtgattggagagaggttttcagtcctgagggtgaattaacagaggtagggtgtctcagttcacgggccatcttcacagtttgcttcctctggcagcaggtcaggagaaattgccctttttttttaaacaatgaatctttttactgttttt

SEQ ID NO: 5089 - DNA, 215 bp, Bos taurus
  Clone ID: 31-LIB34-068-Q1-E1-H3
atttaatttgctaaaaaaaaaaaaatcactcagtaagacggttcatacaagttattattgttggaaatttggtttgttttcctcaaagtcactgacttcaagtagttcatttctgttttttaaaaaaaggtgtttgctatgtgggaaaatcaatcactgccaggattctctcatttctgtactgttttatagaattgaattttaacgttttctca

SEQ ID NO: 5090 - DNA, 234 bp, Bos taurus
  Clone ID: 31-LIB34-070-Q1-E1-H3
gaaaatacttaaggggaggttgaccatttctagaaaaataatgattttgatggattacacccaccagaatgctgccggactcgatgagaaccaggccaagggctctcttcatggcagtggagtagagtttgaagcacacagtgatgacaagtgtcagcccaaatactttgtcttcaactccaggacggcctatgcaattcccatccctagcattttgcttttgtatgccaccct

SEQ ID NO: 5091 - DNA, 404 bp, Bos taurus
  unsure (222): Clone ID: 31-LIB34-072-Q1-E1-H3
caggctcagggccgatccgggcgccgagacccgcaccctgatcgctcacctccggctcccggcccaccgcctccgcccatgccgacgcccgccgcctgccaggtgcgccctcgcccgagggccagctaagcgccggccggctgcggcggcgaaaggtgggcccggccccggcgctgccctcgacagcggcaagtttgggagttgcactagtttgcggggtangggagaggctgggcgggggggccatggaggaggaccgggggtcggcgctggcggccgagtcggcgctggagaagaacgtggcggagctgacggtcatggacgtgtacgacatcgcgtcgctcgtgggccacgagttcgagcgggtcatcgaccagcacggctgcgaggccatcgcgcgcctc

SEQ ID NO: 5092 - DNA, 413 bp, Bos taurus
  unsure (324),(400): unsure at all n locations; Clone ID: 31-LIB34-074-Q1-E1-H3
aagagcttctgcccttcgtcgctcgccagaatttgccccataattatctttgggaaggtggaagcatgatttattttggcagtaagggagtcggggcaaggggctgagtcaagacatacatcccgtgccctaatgggatttaatatgtgaacaatgagaatgccactctgtttccatctttattttcgcgaagttcctggaataagttaaatggagaaggactgatcctgtgtcagcttcgcggttcttcctcaaagaccttggaaatattcatctgtctgctctttttttttttttttaagtgtctgtgtcgggtgagggtangtgttaggaacaggttcttgcctcatctgagttaacagtatctggcccgccaatcacctgaatttgttcttgatcnttgggttttcccc

SEQ ID NO: 5093 - DNA, 210 bp, Bos taurus
  Clone ID: 31-LIB34-078-Q1-E1-H3
agcctctatagaaactcgaggtaagtcacctctccttcgcctctgcttcgcgacagctccgtctagtccaatggcgtatatcatcacggtagtcatctgtcatggcttgtccaacggtttcaatatcaggcagtggtcactgtgatctgtgtgccattgactgcattttctcagtatctgtaccagtgtctatttggtaaacatgtatgg

SEQ ID NO: 5094 - DNA, 429 bp, Bos taurus
  Clone ID: 31-LIB34-082-Q1-E1-H3
gtcgaccacgcgtccgcattaacttggggtccggcccggaagttaaaggtggaccaaaattccccaatcccccaaaagcaaaaaatgaacattattcaaggaacaatgtcaatcaagggtgttactggtggattcaaccaagaaaaatgggaacaaatggactccggtcaaaaggacttggtcaaaaaagttatggtggggaactacagccacctcgtctcagttggtgagcagacctttacatgcaacttcctcaagaatgcagattcagttttttctttttttaaatattaatcacttttattgaagaatattaaatgaaaaataaaattcagcacttcattatacaaatcaataagtttaaaaagttatgcagtagcttaccatcatcagagtcatggtttggaatattttcatcatccccccaaa

SEQ ID NO: 5095 - DNA, 403 bp, Bos taurus
  unsure (73): Clone ID: 31-LIB34-083-Q1-E1-H3
agaatctacctgactttaataaagtatccagaagtctcatagtaaattcattcctttacgcagtggagaacanagaagaaaaaagtggtacattaagtgcagattaagattttatttccaattttatattagtgatgtgggaaaagatcttagttctccacctatcatgaatatcttctcaacatttatttattaagtttcaaactttatttcctcaatttttatggccctttagtgttaggactcattgtgaaggcaattaattactctttcttgaaacaagggcttcgtttttttttttaattaatagtaactataactgtagttatttaataatcatttctttttaccttctcgggtttttctgatctgaaactgataatctatcttgagctttgggtta

SEQ ID NO: 5096 - DNA, 63 bp, Bos taurus
  Clone ID: 31-LIB34-084-Q1-E1-H11
tttctcatttttttttttgttggcttctcttttttttctgttttttgccttgttgtccgttct

SEQ ID NO: 5097 - DNA, 384 bp, Bos taurus
  Clone ID: 31-LIB34-086-Q1-E1-H11
aaaggtggaatgcctttgtagcaaattttttctcctggtagcagcaacactgggtgtaggtcaaaatcattctgtggaatgagatgtctcttatgatcctgtaatgtaatagtgtacattgtttccacttagctagcaaggaatttgaaatataaggaggaatattctctacctctacaaaatcaacacttaagctttttttttcacctttagaattatttagaatggacttaagtttagtgtttttccttcgtagtgtgtattatttattgttatgattatttactgacaacagagatatacaagatactgtgcagaagattattactattcatagagtttacaaactaaaagaatggaaaatatgaaaaactgcagagaaag

SEQ ID NO: 5098 - DNA, 413 bp, Bos taurus
  unsure (385): Clone ID: 32-LIB34-001-Q1-E1-H7
gtgactctttgtggtactatagttgtacctgtgttttatgggagaaggaaagaactttaatttatctaaatacagatttaaaacatgacacggtggacagtggggaaagtatgtggatgagaaccaaatcaccctaaatcctaccacccacagataagtgctgataacattttgacatacatgatattacaatttggacatagtctctttcctaattttccagtgaaagaaagtgaacaattttacaggtaacaaaaatgtgttcaaaaattaataaataatgattgagaatagtatattctttagaatagctctacttcatgaaaattacctcatggtatgaatgtaattggttcccatattttattcattgcattgagcatanatgatgtctgggtaaacttctttcaccc

SEQ ID NO: 5099 - DNA, 167 bp, Bos taurus
  Clone ID: 32-LIB34-008-Q1-E1-H7
gataatcatgaaaatctctctccctgaacacagattctcctagctagttgtgaataaaggaaggcttccacaaagagctggctcctggcttgtccccagggctgccatttaacagttagcttatgtttacagttaaatttgaacatgtgactagttctagatcgcga

SEQ ID NO: 5100 - DNA, 91 bp, Bos taurus
  Clone ID: 32-LIB34-013-Q1-E1-H7
attcgcccgtccacccatgcgaccgaatcaccactactttatagtcggacttacacctccatgcggtacgcacagtgcactcatatgacaa

SEQ ID NO: 5101 - DNA, 114 bp, Bos taurus
  Clone ID: 32-LIB34-025-Q1-E1-H7
attcgctcttggtctaaaacagctccgggatatgcaatgccggcttcttgggccactatgctccctgggccgtcatctcgtccatcgagtagcgccaacggcaccagggggtaa

SEQ ID NO: 5102 - DNA, 401 bp, Bos taurus
  Clone ID: 32-LIB34-028-Q1-E1-H7
catgagccgcagccatggagcaggcagctcccgaccctgagcggctttggcagcctgcgccgctggagccgctgagccaccccgacgctgggctggagtccatggttggtgaggaaacgaagggggcccgggacgagggccccggggacggcacgatgacagaaaataatttttcgttgaagaagatagaaattagtgtttcagaagcagaaaagcgaactggaagaaatgccatgaacatgcaggaaacatatactgcttacctcattgagacaaggtcagttgaacataatgatggtcagagtgtcctaacagactcactgtggaggcggtataatgaatttgagttgttgaggaactaccttttagtgtacgatccacatattgttgtgccacctcta

SEQ ID NO: 5103 - DNA, 406 bp, Bos taurus
  Clone ID: 32-LIB34-031-Q1-E1-H7
aacaagattcaggaaaaaaaaaaaccttggccttttcatacctcccaagtatgtcatactttaaatatgtatagtacttccttctgaataatgacatgagtagtatgcctggagtgtggatatgagtatgggattatcagatggctgtcaaatgtttgagcatcaataaatgagactacagaggaagtgtagatgtggaccaagtcttgaggaaggtcataatcaagcactgtttaatatatattctcagaattcttaaactcaagaaatttaattttgtttggtactcctttccttatttcacatctaaagtgaaccgagagaaataacatgattttacaaagtactgtagcatatgtatagtttctgacttctggaattgcatcattttacaatgggctcaaac

SEQ ID NO: 5104 - DNA, 380 bp, Bos taurus
  Clone ID: 32-LIB34-037-Q1-E1-H7
caactggatatcgctacccatctctttgaagcctacagcgcactttcctgttgtttcatttcagaggatttaatggttaatcactttttacctggtctcagatgtttacgcatcgacatggaacatctttctccagagcacgaagttattttaacttccatgataaaagaatgtgaacaaaaaatagagaacaagaccgtccaagagcctcaaggctcaatgtcaattgctgcaagcttagtgagtgaagatgcgaagaccaagttcttgaacaaaatgggccagttgacaacatccggcgccatgctggccaccgtgtttcagaggaagaagtaagcgtgggaggaggccccggccagcactgaggttggcctcaggca

SEQ ID NO: 5105 - DNA, 101 bp, Bos taurus
  Clone ID: 32-LIB34-042-Q1-E1-H11
gactcgccggtcgacgcacgcgatccagatcgagtcatactataatttcgcaatgctgagtttgtcgaacttaggccacaagtgctctatttcatagcatt

SEQ ID NO: 5106 - DNA, 323 bp, Bos taurus
  Clone ID: 32-LIB34-046-Q1-E1-H11
agaagagtaacaaccttggatataatttaatggttttaaccacctcccaagtgcatctttcacttgaattaaggaaagcaggtaaaaataaaaatccagtctacttgtcttagctcctctatcttcctcccactgagttgaaccttagttgagaaaaaattctacttaccactagttttagcaatcactgtatctttagcaatttcgtttgtcttgcttctttacgaggaagatataggagaatacaccgaaccttagaagattctcatttagattatcagttatgctggttactctgataattcgtctaatagatctatctc

SEQ ID NO: 5107 - DNA, 419 bp, Bos taurus
  Clone ID: 32-LIB34-046-Q1-E1-H7
aaaggaatgagcagcatgagttctcaatcttgtgatgagaagagcaagctcttccatatgagaaagaaggtggaatgaaatgcatcttcctttatttgcaacgttcctgaaacttttcctgatctggttttggttttcatcacttctgtccttttttcttccacacttagaggttctctcacccatttggcatcagagtcctccgtttgcatgcctccgggaacttcctagactagttaaaatcacaattgaagttgcattgcttgctcaagtgataatgatttagaaaagactttgggaactgccacattggcttctgagaagtcattgacctcttgatccaatggaaaacctgggaaggattcatatggtttcttttctaaataggttatgctactataggtctgcggttagtagaa

SEQ ID NO: 5108 - DNA, 236 bp, Bos taurus
  Clone ID: 32-LIB34-052-Q1-E1-H7
cggacgcgtgggcgccgactccgcgccgtagcgcaggccgcgctcgcgggctccacgggcgcccttcgaggtgggccctgcgttctcgtttcacaggcgagaaggcttgggcagggagactgaagccacttgtccaaggtcacgcagctggtgagtgggagcgcccagcatggaacccaggaccgcggagcccgcgctccaccctccggtaccgccgccgcctcctgcgggagggg

SEQ ID NO: 5109 - DNA, 223 bp, Bos taurus
  Clone ID: 32-LIB34-058-Q1-E1-H11
ggctcacggtggatcacgctccctcgccctgtgacccgcccactccactggagctgaagggagccctccttgccccgcccaccatccgactcggggacccctcccacacacacgtataggctccgcccactacttaccatgcccctctttggggcctctactctcctgcccttgggtataaagcaaagcagagtccataacaaaaaaaatatcaaaccaaaaa

SEQ ID NO: 5110 - DNA, 226 bp, Bos taurus
  Clone ID: 32-LIB34-058-Q1-E1-H7
ataaaccaaaaaagttcatgacttttaaggaaaagagaaaaactctatcaagaatgcagagaaagtggaagaaagcagaagagaaactagagagagaacttcgggaggcagaagcttcagagagtactgagaaaaaacttaaactgcacacggagactctgaacatcgtgtttgtaacctacttcagaatactgaagaaggcccagaggtcacctctcttgccaga

SEQ ID NO: 5111 - DNA, 116 bp, Bos taurus
  Clone ID: 32-LIB34-062-Q1-E1-H7
ggaacaactccaaggggcacttgcgaaatatgctgtccgtgcgcgtcgccgcggacgtggcccgcgcactcgctcggcgaccggggctggtctccgaaaatcgtttagggtaatac

SEQ ID NO: 5112 - DNA, 338 bp, Bos taurus
  Clone ID: 32-LIB34-072-Q1-E1-H7
agtacttcatcatcaccagcggccgcccttttttttttttttttcagttgatacaagtttaatctaagatgcagtcttgattgggacaaaactttaatcacaacaatcgttaattgcccagaggatctggttgattgctaggggatttgtgggcattcgggacatgtcagagatggacgctcaacagttcacgatggcaattacaggtatacgtgaggccgcttgatcacgatactcaggacaacttgcacattatatcaaagactgataattttttaaacttagaatcacgtacaagttactgtaacaatcttaagaacatgaagtaaaggatgcac

SEQ ID NO: 5113 - DNA, 353 bp, Bos taurus
  Clone ID: 32-LIB34-075-Q1-E1-H7
cgatacaaaactctgaggtgagtcggattagccatgaacatgggatgtaattccatttaattgtgctttactttcatttgtctctaactatatcacatttcacttgttacttctttactgacaacttgatttgagagtgtgttgtttaaattccagaattttgtgagtttgacagttatccgttagttacgaatttcacactttatctcagtgtgatgagtcagccatcatgcatatccatgcatgcagcatacggaagttcttctctaaggttgacgaaagatgaattccttggaccattggtgaatcaatagcctgacaatgcaagcggaatgggtttgatgacctgtcag

SEQ ID NO: 5114 - DNA, 428 bp, Bos taurus
  Clone ID: 32-LIB34-078-Q1-E1-H7
cacgcctatactaaaagtcattgcattaaaaatgaaaaggtggctctggatgagcccatttgttacatatttgttcctaaatttttaaaggctttttgtagttaaagcaggttagtttaacttaattacccagttctttacacttcatagatcatgatgaaagtgcatttgaggccaatagtggtagatgttacagaccttttatcccttaaacataagctttgacaatgataactacatatttcagatgctattacatgaatatcaaaatgtgacatgtcagaaataaagggataatttaaaggtggatatttggacattccttaatccttattatacacataaatgtttgaatattatacccaaaaattaattgtgcaatttgctattactgcattaaattggtaaccataaggtagttcccccct

SEQ ID NO: 5115 - DNA, 410 bp, Bos taurus
  Clone ID: 33-LIB34-002-Q1-E1-A10
aaaagctgcccagcaggtgggcacctggatgcacgtgtgcatgatgggggccaggctgcctggcgcatggcttcacaggtcctggaccccagagagcctctgctccctgccgctgaggggggctcgtgaggctctgagctgggcccggactctgtcaggactggcaccagctcagaaccaagtccctctgccccgctggcatgagggcagtggggatcgtgttgaagcaggaagggccatgtctgccctgcgtctgcatgccctggcgagagaatgaaaaggtgttcaaggccttaataattacgtatcattggcagaagggttttgttcacaaagagaagctgaacaaacgtgcaggttctggtcttccagaatgaagacagagagccgacggcttggctgacctcatt

SEQ ID NO: 5116 - DNA, 415 bp, Bos taurus
  Clone ID: 33-LIB34-008-Q1-E1-A2
gcggtccagaataaccagcagctggcactgaaggtagagggggtcgtccagcatgggtctaaacccggactcttccgcagaattcagtccgtctgtctgaacgtgtcctccacactgcagagtaaatccgggcaggactacaagatacccattgacaatatgaccaatgagatggagcagcgggttgagcctcataacgattacttcagtactcagtttctgctgaacttcgccattcttggcacgcacaacatcacggtggaatcttctgtgaaagacgccaacggtatcgtgtggaagactggtccccgcactaccatatttgtgaagtcgctggaggacccttactcccagcagattcgcctacagcagcagcaggcccagcagccgctacaacagcaacaacagcgaaatg

SEQ ID NO: 5117 - DNA, 412 bp, Bos taurus
  Clone ID: 33-LIB34-020-Q1-E1-A10
atcatctacaagatgaaagaaaagcgagtgcttctcagtgccgacggaccacacagaaacgtccttaaaataaaaccacctatgtgcttcactgaggaagatgccaagtttatggtggaacaacttgatggtattctaacaggtttagaagaagccactggagctgaaactgagagtggcatctctaagaatactccttgcagaaccaagatgcccaaggaagcacagtcagaattgctcagagacagcagcctggaatccagagaaaatcccagccaaaagagaaatggattgtgcacagattcactgctcagcaagaggctcaggacgtgagagatgagcgttttacaagataaatgtccggagttacagaggatgagtgcagataatcccttccgttaaagccctgttg

SEQ ID NO: 5118 - DNA, 416 bp, Bos taurus
  Clone ID: 33-LIB34-020-Q1-E2-A10
atcatctacaagatgaacgaaaagcgagtgcttctcagtgccgacggatcacacacaaacgtccttaaaataaaaccacctatgtgcttcactgaggaagatgccaagtttatggtggaacaacttgatggtattctaccaggtttagaagaagccactggagctgaaactgagagtggcatcactaagaatactccttgcagaacgaagatgcccaaggaagcagagtcagaattgctcagagacagcagcctggaatccagagaaaatcccatgccagaagagaaatggattgtgcacagattcactgctcagcaagatgctcaggacgtgagagatgatcgttttacaagataaatgtccggagttatagacgacgagtgcagatagtcccttctgttaaagctctgttgtaa

SEQ ID NO: 5119 - DNA, 406 bp, Bos taurus
  Clone ID: 33-LIB34-025-Q1-E1-A10
atgggattagtctgatcacttaatatacacaatcctggaagttaattacttgcatcaaatatagtggtatttattattctgtacagagagaaaaatacatataaagcatatgctcacattacatgcacgcagatttcatgctccataaatcttttctattttttaatttacctttctctaaatgatgtgcatgggatatgccttattacagaaaaatgccgttcataatttgactatgtggagaagtgcctatatggtggtaatgctagttaaggcaaataaaacaaattatcttatcagtttactacatcacccgggtacattttttatcatgatgtttaagaaagaaaaatttatacctcaaatgtgtaatttagtttacaatcagttctgcagttgggatggg

SEQ ID NO: 5120 - DNA, 153 bp, Bos taurus
  Clone ID: 33-LIB34-027-Q1-E1-A2
cagggagtcgagtgacaggcactctgacgcagcatcccactactcctgctacaactgtggcccacggtccagcagctcgtcccacacccctgcccctcaggccagcacaggaaaaacgtagttcatgtggcaaaataaaccatgtgcaccgag

SEQ ID NO: 5121 - DNA, 63 bp, Bos taurus
  Clone ID: 33-LIB34-037-Q1-E1-A2
gatcgcgagcggccacccttttttttttgtttttttttttttctgttttggtttctttttatt

SEQ ID NO: 5122 - DNA, 210 bp, Bos taurus
  Clone ID: 33-LIB34-039-Q1-E1-A2
cgttggtcgtcgcaacaccctaaagtgagtcgtattacaccagtcgctccattaaagttctgttcgccatcgcctaaggggcggatgccctaccggtggctctccgtgtcgctggaacaatggttctcattgcgggggcgtgggcagagtacgtcagacgtcaatctactagcaatgtacaggtgacctttactcaatatcaccatcaat

SEQ ID NO: 5123 - DNA, 356 bp, Bos taurus
  Clone ID: 33-LIB34-040-Q1-E1-A2
gattttatctaagaattccaacacttctcagtgtgcaacgatacctaaatagagtgccaacagtccaccgggaaacgatacgggatgaggacacctcacctggccttgagccatattccacaggatagatacttcttgccgtcacataacaatgccccggccgttctgtccatagacatccaagtcgcttaaacaacacgaaggccttccttcatgttataagtgcttaaaagatcacaatcttaccttacatcaaagatgacctgtgaaccagttccccgttgattaaactcaggtcaactccaccttcaggtactgtccagcatctgcaaattgtgtgaaaaactttgtgaacg

SEQ ID NO: 5124 - DNA, 470 bp, Bos taurus
  unsure (380): Clone ID: 33-LIB34-045-Q1-E1-A10
aatgtgaatacttaaagcaagctcctacagccatccaagagctgattcgcaagttcagagatcgctactgtgttttcaacaacaaggccacaggagctgagcaggagaaccagagggagcagctgctggtcctggtccaggatgtggtggacaagtgcaatggtagatactacacaaatagcctgtatcagaagaccgaggaggagattcagaaacaaatccaagtgttacaagaaaattacagagcagagcttgagagagagaaagctcagataaaacagaagttcgaagacgaaatcagaaagctgaaagatgaactagaacagcacaagtggaatgtggaaatgaaaaggcaattggcagaaagggaggctcactgngtttcaaggcagcgaacagccagagatgatgttttgagtcagaataagatacttgaaatcatccttaaagtgttccagtttttttccccc

SEQ ID NO: 5125 - DNA, 297 bp, Bos taurus
  Clone ID: 33-LIB34-046-Q1-E1-A2
gagacctggaccccgatccaagactaggggactgagccagcagggagctgctggtgcatcgatcatgaagggctctagggccctggactcatggccaccccactgccacaggaggtgatggcatgtcggggtacccctcagagctggaagccgggtcaccatgcaggggacgacctcatgacagctccatgaggtgctcccccaactctgagcccaggcccctgatcgggtgcagtgttgtgtctgcgggacaggggagcagtgccaacgccagagtaaagacagttcgatgactcc

SEQ ID NO: 5126 - DNA, 241 bp, Bos taurus
  Clone ID: 33-LIB34-054-Q1-E1-A2
gtttgtcctcttacttgtggccaatgtcaagtcttcagcagactctgagctgtgtggacctcgtggagcccgaggacctccgggactcagtggtcttccagggccacctggttatacaggacccataggtatgccaggactaacagggagacctgggcttcctggactggttgagaagtgcccacccctgcctcagtctgccttttccgtcaagctgagtgggcctttcccaggaccctcc

SEQ ID NO: 5127 - DNA, 346 bp, Bos taurus
  Clone ID: 33-LIB34-055-Q1-E1-A10
tttgacttttcaatgagtgtcctaggaaccttttagaaagaaatggacttgcatcctggaaatatattaactgttaaaaagaaaacattgaaaatggttttagacaacgtcatcccctggctacaaacaaaagatattcctgggtaaaattggaggtagctagtgccgaggtcaaaagataatgatctccctgtttataaaccttcactatatttggatatccctaaaactgtgttcttaaagtctaagggcaactttagaaggctggatgtgcccggggaaacaggagatttggattcacaacactaaggagatagcacttaactatcttaactgttttgtgttt

SEQ ID NO: 5128 - DNA, 356 bp, Bos taurus
  Clone ID: 33-LIB34-055-Q1-E1-A2
aggcagcagtacgcttccgctttccatttcctcagcgcagccatcaacttccagccgaagatgggggagctctacatgctcttggctgtggctctgaccaatctggaggattcagagaatgccaagagagcctatgaagaagcagtccgccttgataagtgtaaccctttagtaaacctgaactatgctgtgctgctgtataaccagggcgagaagagggacgccctggcccagtatcaggagatggagaagaaagtcaacctactcaagtacagtagctctctggaatttgatccggagatggtggaggtagcccagaagctgggagccgctctacaagtcggggaggcactggt

SEQ ID NO: 5129 - DNA, 220 bp, Bos taurus
  Clone ID: 33-LIB34-065-Q1-E1-A2
atccgcggacgcgtgggcagatatttgtattaaatttggagccatagtcagaagactcagatcataattggcttatttttctatttccttaactattgtaatttccacttttataataattttgatttaaaagataaatttatttatttttttaacagtcagaaatcctcgctgttctgatctgcagcaacctttaaaatgattgtattgtttttaggct

SEQ ID NO: 5130 - DNA, 201 bp, Bos taurus
  Clone ID: 33-LIB34-066-Q1-E1-A10
aaaacagctcatccttttctacttttatttattgttcccttgaaatgactgaccaggaaaaacttctttttgcaatagaagaaacagagggatttggacaagaatgaatgtggcttcttgtcttggaggagctcttgcatttaaataccccagccaagaaaagttgcacagatagtgtatataagctgttcattctgtaca

SEQ ID NO: 5131 - DNA, 238 bp, Bos taurus
  Clone ID: 33-LIB34-067-Q1-E1-A2
ctcaacagtgctcaaaacatgtcttaattcttcttgagttctacgtcaacacagatgatccttccaatattgctgatctttcaatttcttggcctgttttcaaccaatggtttttgcccttcaccctactttatctattacttacatactcataacctagattttgtcattatcaataactataacctctacatagtattaatagcaaacttcatattaacaaagtgttaggtaggaa

SEQ ID NO: 5132 - DNA, 84 bp, Bos taurus
  Clone ID: 33-LIB34-068-Q1-E1-A2
gggtcgaccaaacgtccggggatttcagatggacacaggcacatgaatggatatggatcgcatacttttcaagctggtttaatg

SEQ ID NO: 5133 - DNA, 221 bp, Bos taurus
  unsure (189): Clone ID: 33-LIB34-069-Q1-E1-A2
catcgatgatgatcaaagagctgggaatggttctgcagtttcatggactaataaagcagcgtcaggccctctgccctctcccagaagcctgtctgcatgatggacatgaaaggctggcaatgactgaaagcgaagggtcaccaaatgatcattctgtgaaggattccactgatggacgtttccatcganaagtctcattcccaagggtgacaaagtgggaa

SEQ ID NO: 5134 - DNA, 372 bp, Bos taurus
  Clone ID: 33-LIB34-071-Q1-E1-A2
gaacagaaaagttaatatgtgctcagcagatagagtgtttgcaaaacattcactatggagcatccacttcatcctgaggatgcattacggattgggtaacaaagcacagtctctccctcaaggactgttttgttttcatggaaaaattcagacattacataaacagagaggatgatataatgtcacgtacatatcagcagcttcagtcattatcaacatggggccaatataattattccctacgtcctaacccctttcctcttttgggtttgttttgtagcaaatcttacacatcctgttattttaactctaagaatttttaaaaatacttaaaatggcatatcacacttaaaataaacataattctttaat

SEQ ID NO: 5135 - DNA, 273 bp, Bos taurus
  Clone ID: 33-LIB34-072-Q1-E1-A10
gcgtccactagaactagatcgcgagcggccgctcgcgatctaagaactatatcacgagcgggagcacgtttttttttcctttttaatgcgcatcagtatcccgttctacagtgctgcttgtattgctgataagttggcaacgtctacaagactatttcatttatgaatcaccattatatagaccataagctcaaatgtgattccacccattttacctataggagaatagtcttggcaaacaacagttcactttacatctatggaaaagccatg

SEQ ID NO: 5136 - DNA, 425 bp, Bos taurus
  Clone ID: 33-LIB34-077-Q1-E1-A10
gaatgacacttcgtgtgtgcttgtatctatgaaagcaaccgtgtggcagcatctcatcgctctgtgtagagaattgactaatccaagtcagatggctctcgcatgacccacctggggtattgggtaggagtggggagggtaaggagcaggatggtgggctggatgtgggtggcctggtcccaggggtgaggggccagggctgcagccatcctggccctgggggagggagttgggggcaggggtgggatactgaattgagtcttagaagaatggggccaggtagcagctgggattggtgtgaggggggttggtggtggggacaaacccaacctcattctttcagaagtggtctgggaagaagggcagagtcaaagggatcatttacccccagcgtggcggggtgatacattggtaaggaagctgct

SEQ ID NO: 5137 - DNA, 181 bp, Bos taurus
  unsure (123): Clone ID: 33-LIB34-086-Q1-E1-A2
cgggtagaccacgcgtccgggtaactctacccagaacagggcggaaaatgatccttggccgtggtttggaaaaaaacctacccctcctcaaacccctgaaggcaggaatttctcagggggacngaacctgccttcacttctcaaggggactgggacggtcccctcgcctcgcgcgccgccc

SEQ ID NO: 5138 - DNA, 319 bp, Bos taurus
  unsure (273): Clone ID: 34-LIB34-004-Q1-E1-A6
cggacgcgtgggccgccaccctcctccgtcctctgaaggagcctggtcctcactccttgtgctgagactcccccaggggccccccaaggcctcctgtctggccttgagggctctgcctgtcttctcacccgggaggagggcaaggccatggggctgcccctgctgctgcccctgctgctgctgccagcgtctctgcaggctggtcaccgggcacaaagaaattcacagcaacactatgagatgaagcaaccaagggatctctcagcccctganggtggctccatcctcaaccccttctccttctctcaacccggggaaa

SEQ ID NO: 5139 - DNA, 370 bp, Bos taurus
  Clone ID: 34-LIB34-012-Q1-E1-A6
catttttgtaaaatgtagaaatgcatgtaatcagttaagttttatattttacaatgttctgtaaaataaaacttagcgaggtaaattgaataaaggagcagtcactctctaacagaatgtaggagaagtttagttggttttagtctgttttgacttgcccttaatttaatttatggcaaatcataactgtatcgaaggtttagcagtataatagcaaagtcctactccagtaaataaagttgttatgtttgtactaactttcaaaaacattatgcatgcctatcattgcaaagcatctaattgttctcttcacatgataaaggtggtggaggtggatacagcagtcggagaacctctggcagagacaaat

SEQ ID NO: 5140 - DNA, 406 bp, Bos taurus
  Clone ID: 34-LIB34-017-Q1-E1-A6
taaacctctagggtgactctaaccatccattaaaccatacatacgccttaaaggactgaatacaccacttctccaaataagtggaagactctgaaacttacacaaatcttaatgtggtacttctaatacagtcaagagacaatatacacatacaaaaaggaaactgtaattttaagtgagaattattaggttacaatattatgtgtattgaattgtctgggcgggcataaatggataaagaagaaaaaatgagaagaaataaaaatgctggctataatcagtctatgtggtttgagatgaataggtttaagaaattagaatactttgaaattatttgtatttcctatattttaacattatagactgcttttatagtcaaaaagagttatcagaccaagaaaataga

SEQ ID NO: 5141 - DNA, 178 bp, Bos taurus
  Clone ID: 34-LIB34-021-Q1-E1-A6
ggaccagctcagaagggctacccttttattcttccatcatgagaaccatatacaggattcctggggacgtactgtcctgcaggagatgtgaggtggtggggaaaaggggacagagaaatagttcaaacagtctaataaagtaagttttttggacctctaaaaagaaaaaacattcaaa

SEQ ID NO: 5142 - DNA, 103 bp, Bos taurus
  Clone ID: 34-LIB34-028-Q1-E1-A10
agacggggaccctgttcagtccggcacctcccttccgttggctgttagtaccctggttagaacttaaggacactaagagactcgtactgcctgtcttccacct

SEQ ID NO: 5143 - DNA, 408 bp, Bos taurus
  Clone ID: 34-LIB34-036-Q1-E1-A10
aattctagatcgcgagcggccgcccttttttttttttttttttctttcgtttaaataaatttatttcttgtaactttgctctgtttagattatgtagtttttgttcagttatgagaacaatttttaaaggatggtggaatattggctagcttaatggatggaataggaaagtggaaaatgtaaaatgccaggaaacatacattcagagctagatatgcttcttctctgagcctaaactggctaatccattaaacacaatctcctcagaaaaaagcacgaagattctactaactgatacatagggttttccttgttcaaataaaagtagataataccaactaatctagaagctagctgaaatacaaagaagaactcccaattagaagaataccccagtttcgagataaa

SEQ ID NO: 5144 - DNA, 414 bp, Bos taurus
  unsure (393): Clone ID: 34-LIB34-038-Q1-E1-A10
gtctgtgagcgccgcgctgaggagccccgcgaggccccgagccctccaccccgggcggtctcgcgtttcccgggagcggcggggaccgccagactgtttgccacagcagctgcaccgctgtccattcccatcagctgtgcgcgagggttctggtttctccagatctgagaacgcgtgaaggaagctgccgccatggtctgctgggctctcaggagagtcggtctggcgcgtgcccacctggcccggaaggccagcggagtctgccggggccacgagcatcagcccttgggcccgaggcctgccgccccgggagccccgggcagcgcggtggagctgctgggcaagtcctaccctcaggacgactacagcaacctgacccggcaagtcctgtcnaaggtgggccggaacctgcac

SEQ ID NO: 5145 - DNA, 370 bp, Bos taurus
  Clone ID: 34-LIB34-044-Q1-E1-A10
attcgccggccgacccacgcatccacttccttccatactgctctggaacttgcggtacaccagagagaaatccagcatgtttgtctcgatgaaattggctggtgcatcaagatagagcttaatttcaaggatgcgttcaattcctttgacaggctaaaaaacgagtcccggtggtcacagtgcaattatgcctacctaaccgcagtttgtcagggatccaccggtgatgtggacgtggcacagattgtctttacataagttcagacactcttcaagatgaaatacaatcagattgagtacttttctgtgaaaaatgcagtcagatttcggatacaaaccccatgcagagcactctgcatactggcatcca

SEQ ID NO: 5146 - DNA, 227 bp, Bos taurus
  Clone ID: 34-LIB34-051-Q1-E1-A6
aatttttggtgaggccaacttcagggtgttcttgtaaactcttatctgaggaggaactaatgctatttcagatcaaagcagtcttcctccctaagaaactacccaaggaacaatgatagagtcttcttcctcggctgtctgcaggatgagaaactgagactgggcagctgatatagcttcttcaagatcacagaaattgactggcaccgctgggactcaaatcaggt

SEQ ID NO: 5147 - DNA, 233 bp, Bos taurus
  Clone ID: 34-LIB34-052-Q1-E1-A10
attttctgggtagacattcttatagagtattgtctttaaaatcagatcgtctcttctatattgaaagcatttttatgttttctaatttaaaaattaatattttcttatagatattgtgcaataaagctgaagtaggatgtgtggtttttgcaaatgctttaacagcggataaaattttacatttgtaaaattaatatattgtattggtacaaaatagttttaaattatatttt

SEQ ID NO: 5148 - DNA, 221 bp, Bos taurus
  Clone ID: 34-LIB34-057-Q1-E1-A6
gccgcttcggactccgcaccgagaccacaggcagcgtcaccttccgcctgcactgtctgcagcagtcccgggccttcatggagtcaagttccctccgaaagaggatgcggagtgtgttggaccgtctggagggattcagccagcagagttccattcaaaatgtgctggaggccttccggcgagcccggcgccgtatgcaggaggcccgagaaagcctcccc

SEQ ID NO: 5149 - DNA, 165 bp, Bos taurus
  Clone ID: 34-LIB34-058-Q1-E1-A10
gttctagatcgcgagcggccgccctttttttttttttttcagaatgattaagaagactttattagactcaattacacataggatggcttatctaactcacacttaaatttttaaaatttgcttgacatatgatttcacattgatttttatttcatttgcaaagct

SEQ ID NO: 5150 - DNA, 190 bp, Bos taurus
  Clone ID: 34-LIB34-061-Q1-E1-A6
gacccacgcatcaacactcatcagcataaccgagtggtcacagggacgacgaatacgtagtttacacgtgtcgcacctccgcagccaagcttggtcagactaaacgacctgcgtcaccatctggatcatggcatgcaaagaacaccagggaggtaacaacataggtatcttcacttgagcgcccagcgaa

SEQ ID NO: 5151 - DNA, 173 bp, Bos taurus
  Clone ID: 34-LIB34-064-Q1-E1-A6
acgcgtcaggaggactttttggtaaagaattacacaaagttgaaggctacattcaagataaaagcaaaaagaagctccgtgccctctacgggaaatggacagaatgtttgtacagtgttgacccagccacgtttgatgcttacaaaaaaaatgataagaaaaatactgaagag

SEQ ID NO: 5152 - DNA, 200 bp, Bos taurus
  Clone ID: 34-LIB34-065-Q1-E1-A10
aaacttctgagaaaaatagagctacccagtcatcagagtcagtatgtcttataaaggagtcacaaagaggaaaacagatgctattttgttgttcagaaaaaataaaataatatagctttggctatcttccttaggatatgaagttcttccttcaggctctctagtagcatcatcctgtgctatattttaagactgaaatc

SEQ ID NO: 5153 - DNA, 254 bp, Bos taurus
  Clone ID: 34-LIB34-066-Q1-E1-A6
ctagttctagatcgcgagcgggcgccctttttatttttgtttttttttttatcgcaactcttttagcaagttagaaatgggtaaacacagcacaagatgtggcgaaagcaacactgtgatgtcctttgtgcagtcagacctgtgcgtaacgcagcaatccaacaggccgaggctgacaactcccgggtatcgcagggtgacgcatcaccaggggacaagggcccagggctctggatgactgacatgaagcactg

SEQ ID NO: 5154 - DNA, 202 bp, Bos taurus
  Clone ID: 34-LIB34-067-Q1-E1-A10
gctggagcacccgctggagggagaggccaggccgggccaaggagcctggcccgtcatggccttggccctgagcccgccccgggtccccaagcccaagagcgccctgcccctgcactagtatgagagcttcctggagaagaagggaccccgagatcgggattacaagaagttctgggcaggccttcagggcctgactctgtat

SEQ ID NO: 5155 - DNA, 237 bp, Bos taurus
  unsure (8): Clone ID: 34-LIB34-068-Q1-E1-A6
agttcccngggtacaacccacgcgtccgcctggtagctcagctggcatggaaacgatagcaaaatcaggacacacaccttgaacttttcagtcccacgagttcacatgaggagcagtgacatttgtgaaggggcgcataggatcattgtgtcagtattgctcagcacctggaaagtcctcaaccttgtttctgatccagagctacggattttggtcagcaggcagctcgtcggtgcc

SEQ ID NO: 5156 - DNA, 191 bp, Bos taurus
  Clone ID: 34-LIB34-069-Q1-E1-A6
gactagttctagatcgcgagcggccgcccttttttttcttgtatttttttttttatttttttattcttattattttatattttttttatttctttcttttttgttttttaagccctaggaaacaaaatacttaatgaaaagggatgtaaacaaattatcaccggagataaaactgttagtggtagttccca

SEQ ID NO: 5157 - DNA, 154 bp, Bos taurus
  Clone ID: 34-LIB34-070-Q1-E1-A6
gttcccagagagttcaagagccagctccaagaggcccctctagaatggaaggacgctggaatgcacaacaatgggtggattcgggatgcatgaagatcgtcaagaagataaaaatccaaagtgacatatatgatgtactggacatggctgatat

SEQ ID NO: 5158 - DNA, 393 bp, Bos taurus
  Clone ID: 34-LIB34-071-Q1-E1-A6
acatttacctcactgataacccaatatctagcatttgctcatatacattttttcattcaaattacagtatggactttgacatgaattgcaatgaatgatcaggatatcacgaaggttgtgagagataacagttggagttgtatggtaacgataaggtcttcaataaagacatgtatattgagaagagtcttaccagcatgtgcatgaagcaagcgaacatttggaaaaggaggttcaggatggttgaagttacaatttggtgtttgcacaaacaagcttgcagtagacacaggataaagcaacacatccgactgcataacgcagagatgtgtatgcacccgtgagcatacgcaagacatgacagggaaatgtcatttgaggacagcatgtcag

SEQ ID NO: 5159 - DNA, 443 bp, Bos taurus
  Clone ID: 34-LIB34-075-Q1-E1-A6
acgcacgagtccaagcagctccaggccattctcccaacattgtgatgtccctgtagggctggccagcatcaggcccagccaaagcccccttctcagtctctccacagactcatctgtgagcagcccaggtcaaccggtgctcctcagaggcagggctctgcaggtccaggtggcctcaaggtcaccaccctctgcctggccctatgtgctggatggtcctgaaaacagaccagacctctgccagccaccagagccacctgagccctgcgtgcattcacgtgcacacatggaagaatgcctatcagctgggctgcagggccccacccccacctcctggtgcattcctgcgtttcatcccttcttctggactttgggtacactctcaattgccagctcccatcctatccagtcgtcctgtagcccaagccccattgtgatgacct

SEQ ID NO: 5160 - DNA, 410 bp, Bos taurus
  Clone ID: 34-LIB34-079-Q1-E1-A6
accagggcacaccatggaggtctcctgttgaatgatccttgttgtcctggtgtgggacccagccctcacctcccccagtactaacctgggaggtgcccagggcactgggcccaagtgagcacaggaagctgggcagatcatgtggggagatgaccttgatctttgattgctaccctaaccttgacctctaacctgtgatttccctcagctcctgggagagatgtcctaatatctcttagggacccagacccctaaatgatccctctccttcatcttggtgttaggcggagaaggcatgtatccctgctccctaatctgggtgtctgtagctaagggacaagaggttgtggaagttgtccgtggtgactcccccagactctccctcctttacccaaattgccaagggtaag

SEQ ID NO: 5161 - DNA, 338 bp, Bos taurus
  Clone ID: 35-LIB34-002-Q1-E1-A12
cgggccgcccagctcagcgagctggtctgtggcgggccgtcacgctggacctggcgatgtgacctgactgccagagcccgctgccgaccaggagtttcagccccaaggatgcgtgggcaggaaccggtgcacctggagtccctgcccatgacaaggttccgcgggacagtgaccagcacaccggggcctcacgctgcagctacaagggcacacgattggatacccgagcaccggtggaagtgacggagcaagccctgcccgcacctcgatccaaccagcccgtgtccggatacaccggcctgaacacacactgtgtcctctcgggactcatgtgtgac

SEQ ID NO: 5162 - DNA, 394 bp, Bos taurus
  unsure (370): Clone ID: 35-LIB34-003-Q1-E1-A12
gcgagcggccgccctttttttttttttttataaagaataataaattttattttttcagaagtggaaaatgaccctgaatagttttaaatgtatcttttagtagttggtgtctaataataaacaagcaatcaattttaaatgttctatatagttgtattaactgattttaagtttaaaaggtaatttttaacattggcattcaaaagcaaagatataactgaaaagaagacagatgaaccataaaatgatttacaaaatgtagtagcttatgaatgcaaaatagattccagttgtaataatacatattcacatacactttcgcaacacactcacacccccatattccacagacacatttccataacttganaacaaatatttcatgtatcccgat

SEQ ID NO: 5163 - DNA, 308 bp, Bos taurus
  Clone ID: 35-LIB34-003-Q1-E1-A4
ttttaatggactgtcacttaggaccacccccccccccccatccaggtccctgctggcaggggattggaaatacgtcatttgtaaaagaaggaagacattgcatttgttcacttttgtaacactgtgtcctggggatgagctggagaggaggtgttgggtagaagccagccatatgtcgccacgtgggcatccatggggccggtccctcagagacgcctacaggacaatgagagctctgtcctcccccacaagccccacccaacatcttggtttaataaacactacaaagagtcatgagaaaggtaaaa

SEQ ID NO: 5164 - DNA, 386 bp, Bos taurus
  Clone ID: 35-LIB34-005-Q1-E1-A4
cctatttgcaaataattatcaatactaaggtagttcttttaatttagcaggtctaaaataggatttagttcattttagcttgaataggtgtttgctaacattgatttgccatttaatacagtcttgagctattgtctagaaaaacaaaagtgctaacactacaaagagatgcaaattactagtctcgctcacttttacaacacagttacatgaactggatttaaaaattaatactcattgcctaaaatttctagatttgcaccttttttttctcaatcagtagcaagcacatttgttgtacactttggtatagcctagtatgaaatacacgtgttatgttagtatgataatattaaatcatatttcaatagtttttgctggaatgt

SEQ ID NO: 5165 - DNA, 424 bp, Bos taurus
  Clone ID: 35-LIB34-010-Q1-E2-A4
atttatttttttcctatactgagtaacataagcgtaagcctggaggaaatgggacggatgttccctattgcaataatgtgacgactgtcttaaacaggcaatattagtaataattgcattgatttagtcaaaaccctgagtgtatttggatctcatgatttaatcttgtgaacatttcctagacgcaagctataactttaataaacaacaagtaacccctagcccgatgtctacatggtgcatctcaaaaccctagcacactggtgtttcttttcttatttgtttctattattaatacttcacgaaaaatgggtttattgagcctctgctatgcttagtcatcagtcgtgtccgaccctttgtgaccctttggactctaaaccaacatgctcctctgtcaatgggaattttcaagcaagaatac

SEQ ID NO: 5166 - DNA, 388 bp, Bos taurus
  unsure (170): Clone ID: 35-LIB34-011-Q1-E1-A4
aaatcatttaaactcagatgtgaatacctgatagattgttttgcagccatcgaaaagacccaatagctatgtggaaatatagaaaaatagttcatagtataatactaagaaagaaaattatagtggactattaaatgttagcaatgttatgctatgtctgtggagagtangaatttatatggacaagaatggatcatgaagatagaaaagtaaaaacagtttatgtgtgaatgttaagggtggagtaattttaatgtacctaaaaaattatttcctttattggaacatgcttacgtttaatacctaaaaatcaggacgtgtagctaaataactaaaacgcccagaaattttttaaatgagtgataatgagtgatagagtgataataaa

SEQ ID NO: 5167 - DNA, 138 bp, Bos taurus
  Clone ID: 35-LIB34-013-Q1-E1-A4
ccacgcgtccgaccaacttcaaatcaatacagccttcggtatatgaccacctcagcagctgtaacaccttaactaacgcatgtcatggactatcttagtcacagcacgttatgttgcactatgatccaccatcatgtg

SEQ ID NO: 5168 - DNA, 341 bp, Bos taurus
  Clone ID: 35-LIB34-015-Q1-E1-A12
cctccgaaataattcccaacgcagggttggtggttttgggtttggggaaatagggacaacgaagtcttttgtaaatgctggtcatattttatactaaacttgacagacatgaatactgttgagcaggctttgcttcagcaatctgtgctatgttttacgcaacttgctaagctgtgctttgtcttccaacaatcccatgtgccactgtctacccattgcaattaacgaagctgaaatgtaagtcacgtggccatggttgcacacctagtaagtgggcagagtggttcttcagattcatgaccgcctggctttcagtactaggttctcatcctttctgaaat

SEQ ID NO: 5169 - DNA, 262 bp, Bos taurus
  Clone ID: 35-LIB34-021-Q1-E1-A4
ggaaaaattgttactgtgaatagcatggtgggaattatagctgcacccctttctactggatactgtgccagcatacatgctcttcggggattttttaataaccccccgaaataaacttccaacctacccagttataaaattttcaaaaatttgcccggaacctttgcatccaattattgtaaaaattccccaactggaaaaattcacaaacctaaaaggcacaactgcaaacaattccaacataatggaaacaattcgttgt

SEQ ID NO: 5170 - DNA, 419 bp, Bos taurus
  Clone ID: 35-LIB34-026-Q1-E1-A12
ctcgcgggtcgacgcagttccctacatcgagtcgtctgaagtacatgggagatactacccgcgattgggtaaagaagcatgcacgtactacagcatatctcatgagcattctgtcggtaattaatccctgtttgatgagatgagtttgcattgtgtcaaaaaatgttggaaagagaagtttgccatataaaaatctgaagatgatgtcaagaaacttctggatttctttaagaatatgcacaagataaacccagagttcttctatgattaagaagttgatgcaaatgatcgtgtaagaaatgtcgtttgggtgaacacaagttgcaaaggatcgtatgacaaatttggagactgcgttacatttgacacgatgtttaaaactaacaaattctacatgtcgctgggagtctttgtggggg

SEQ ID NO: 5171 - DNA, 379 bp, Bos taurus
  Clone ID: 35-LIB34-027-Q1-E1-A12
taaaaataaaaaaaaaagaaacttcaatacctgtgtttacataagaaaaaactaaactgaaaatttctgaggagtaattcagaaaattggaaggactactgcattttctgttttaagtaggttaaaagctgagcatttgtgcaaaccactttgctcacagagaagtgtgtccttgatgctcagtgaagagaggtcttgttttatggaaaaaggatgcctactttgtcaggagtaagaggaagggcgtggtaatttcacgaattagaaaaggtctctcagcccgacagcacttccatggtgtttagttcatgattagtgctttactgagaaatttccgtctcattacaacagattgcttaacattctgctgactttaaaa

SEQ ID NO: 5172 - DNA, 282 bp, Bos taurus
  Clone ID: 35-LIB34-027-Q1-E1-A4
caagaagtttattggattgcttccaggttattacatagccagcaaggaagggcactgacccttgaactcagatctctttctctgagcatgtccgtccttctatacctcagatgacagactagtcaaaattcacttctgtaatttttaatacagtttttgttaccctggacgccctttctattagaagagttccttttctaaatgaaagtgactgattttcaagttgccaacaatttatatagtaatatgtcactcattctctgcataaattaattctcacaa

SEQ ID NO: 5173 - DNA, 397 bp, Bos taurus
  Clone ID: 35-LIB34-030-Q1-E1-A4
aggatggctatattctaaggttgaagcttcattgggttctgctggtcacacaacccttggggtcacacttatgatcgggggtataacatgcattctttcacttgtctgtgccttggcccttgcttacttggatcagagagcggaacgaatccttcataaagaacaagggaaaacaggagaagtgatcaagttaacggacgtgaaggatttctccttacccctgtggcttatatttatcatctgtgtctgctattatgtcgccatcttccctttcattggacttggaaaagttttctttacagagaaatttggattttcctcccaggcagccagtgctattaacagtgtcgtatatgtaatatcagctgccatgtccccaatatttgggcttctggtg

SEQ ID NO: 5174 - DNA, 395 bp, Bos taurus
  Clone ID: 35-LIB34-031-Q1-E1-A4
ttccgggaccacccacgcgtccgcaaccgttggctagaacactgcagactatggccgtgcccacgagccatagtttggggccatggtgtctcagcacagccaggatagggtacacagttctttcagattctcagctagagttggaagaaactctgggtggcttcattatgcccagatacacaaacccccatcccagcctctccccgcattttcctgcgcccttgcccacaccagctggtcaggcctgtccccacagccctgccgattggagaagccatgttcagtccattgcaaacacttgccccattcgcatccctctgatattcgacggggccaggccagcgtcacctctggaagtacccccatccatatgagacctgagatctggggagctg

SEQ ID NO: 5175 - DNA, 157 bp, Bos taurus
  Clone ID: 35-LIB34-035-Q1-E1-A12
caactgctgcaattaactgcctgacagacgctctcctgtgcctgatacactctagcactaactcgcctgagagcggggcccactcccgacgaggatcatgcatctgacttagcacagcagtgcccataaactgctgtgctacctcctgttgtgagtg

SEQ ID NO: 5176 - DNA, 412 bp, Bos taurus
  Clone ID: 35-LIB34-035-Q1-E1-A4
aaacaagttcaattaacagtttgagatctgtttaataacacgggcaaccttgtaagtcacagcctttcaatctgtgttctagtactgcaggcctttcatttgaatgttttttttttaataacattttccttaaacaaaaacagtaaaaaaaaagccacatgcaaattggagtgtgtcatcaaatgtgactgcactggagctgctggctggcctggctgatgcccacctggcgggcgtgtgtctccagccactgcaggcaggactcctgccctcaaccccgactggggtcaccatgtggtggggtgaggagctgcaccctcctcagcctgaccagaagacactgactgtgtcataaatgtcctagtgttggaacttaaagattgaagtgctgcttacatgtcctgtctgtgac

SEQ ID NO: 5177 - DNA, 411 bp, Bos taurus
  unsure (212),(265),(300): unsure at all n locations; Clone ID: 35-LIB34-036-Q1-E1-A4
catacccaatggtattgcattaccgacaaaaaattgatttcggttagacaaaggggccaaaaccccgccaaacgagccctgcactatgtcgacagattgcacagtgaaaggtgtgtggactagagggacgcagccagactctcacatgcgaacaaggccactgtctgtctctaaactgtcagttgcatttatgttgtttctattcagagcanaccaagtgccattctgctaccgaaccatctgcataaggtgtcgtgccgtctcncggtgtacaatacaagtcatggttggaatcagtangtgtgcggccatgacctagccttctcaatattttgcttgcctgttccaagattgttctaatgtttgattacagtagtaatatggctcaatctttgtggtgttgcagttttc

SEQ ID NO: 5178 - DNA, 375 bp, Bos taurus
  Clone ID: 35-LIB34-039-Q1-E1-A12
tagatcacgagcggccgccctttttttttttttttcacacacaggaactatttattttggaattatggctatacgacatcatgatgtaaagacacttatgctacaaggccagtagtaggagctactgttttcttcacctgacactcagtatcaatacatgttattatccccattgtacagactgggacacagaaactttgctaatatcacaaattattgacttggccaaaaagtttgttcggattttccccacgctcttacgacctgagcaaaggttctggccaacccagtactaccattagctaggacagaacccaagttgcttaaacacacctcccacaacacagactttgctacctcccaagccaacctctc

SEQ ID NO: 5179 - DNA, 260 bp, Bos taurus
  Clone ID: 35-LIB34-039-Q1-E1-A4
gtgaaagttgtatgacttttatatttctgtgccatcaaataaaggtaaaaatgtcttttgtgcagttttgctgttcaaacagaaactattggcctccttggccctaaatgaaagggctggtattttaagttgactattttattgtaaattaatccatcttaatttttttaaatttggttgaatgttctcttgttaaatgtttaaaaaataaaaactggaagttctttgcttagtcataaaagaagagagtacgaacgaac

SEQ ID NO: 5180 - DNA, 290 bp, Bos taurus
  Clone ID: 35-LIB34-045-Q1-E1-A4
gaggtggtggtatgagggttcaggatgggggacacatgtacacctgtggctgaatcatgtcagtgtatggcaaatcccacaaccaatatcgtaattagactctaattacgatgtgaataatatattatagttgatactgggctgccatctatggggtcacacatagtcggatagcgctgatcgcgacttatgagcatcaccagcagcatggcaccttaagttgatgctgcagttattcttattaatagtgtcatgtcactatcctgggaatagcttttacgcgtcattat

SEQ ID NO: 5181 - DNA, 245 bp, Bos taurus
  Clone ID: 35-LIB34-051-Q1-E1-A12
cgtggagcagggcgcgatgagctgggagctgctgctctggttgctggcgctgtgcgcgctgctggcgctcgtggtgcagctactgcgcttcctacgtgccgacgcggacctcaccctgctgtgggccgagtggcaggggcgacgaccagaatgggagctgactgatatggtggtgtgggtgactggagcatcaagtgggattggagaggaactggcttaccagctgtccaaactaggagtttctc

SEQ ID NO: 5182 - DNA, 230 bp, Bos taurus
  Clone ID: 35-LIB34-051-Q1-E1-A4
gtgagatttaagaggtccaagaaaatcatgccagctggactggttgcaggtttaagcctcttgatgatcctgagacttgtcttactgctgctttgagaagccagagaaagtgaaaactaaatctgagtcgttctgctctaatggccagaagcctactgtttgtactgaaaagataaattccagtgtggaatgttcagtgtggtcttattttatgttggaaactacccaag

SEQ ID NO: 5183 - DNA, 354 bp, Bos taurus
  Clone ID: 35-LIB34-055-Q1-E1-A4
aaattccaaatcgcttgaaagtgaataattaggataaaaatgtacactatcaagctctttcttattattgctcctctagttatttcttccagaactgaccaagactatacatcacttgactctatatctccagagccaaaatcaagatttgctatgttagatgatgtaaaaattttagccaatggcctacttcagttaggacatggtcttaaagactttgttcataagactaagggccaaattaatgacatatttcaaaaactcaacatatttgatcagtccttttatgacttatcactgcaaaccaatgaaatcaaagaagaagaaaaggaacttagaagagcgacatccaaa

SEQ ID NO: 5184 - DNA, 367 bp, Bos taurus
  Clone ID: 35-LIB34-056-Q1-E1-A4
atcctgaaccaggagggacatttgctatgagctgctgctggacacatctgtatccttggtggagagagccagaggaactacaaaaacgcttttgttcagggaccctgatgccctgggtggacatttgagttgttgcttaccgctgctgagagactcacttcttccgatagaagcataatcatctatgacttcatcttttttgtggctccaaaggctacctcttcatatcgtctatagactgaactgcaagtttcttataaagcttgtctcctctgtgttcttgtccttcttttcttttgacctaatggagctagaaatatctgtatgactgagtctacctagtcctgtagtaatttatgtttctttt

SEQ ID NO: 5185 - DNA, 235 bp, Bos taurus
  Clone ID: 35-LIB34-060-Q1-E1-A4
ataattctagatcgcgagccgtcgccctttttgttatttttgtttttttctttttgtctgttttcttttctttgggcgtctctgttctgtgtgctctctcattatcctgatttgtaatcctctggaacatggcgatgcatcggtggcttaacgggaaggacggtgactgttagcctgtaaactaaaccaagagtgatccgcctcacgctccggaccaagaatcatcttgaacttg

SEQ ID NO: 5186 - DNA, 262 bp, Bos taurus
  Clone ID: 35-LIB34-066-Q1-E1-A4
ctcgggtgcacggcaagtgcaggtctagcaaggaacttttcttacaatgtatatagccatccagagattcacggctccatcactgaactgttaattcatattcatacttggtttctctgtgtctatacacaagcaacaaattcttaagtgtgtgatcttgcagggaaatgttttgcttatttgtttaaaaaagtattgagaattggatttagacggtcgacatcagagaaccaggaagtttgggtttaaaagagatttataa

SEQ ID NO: 5187 - DNA, 220 bp, Bos taurus
  Clone ID: 35-LIB34-070-Q1-E1-A4
ggggttgttaaggactgacttaagtttttgagactcactgttaacattgtccttctttgaggaaaggaaagagttggtgttccaggtgttcttggaagcagggaagaggaaggaagataacactgccttgtctcagtggacctatcactttctggcctatatatccgttgggaaagtcccatagtactaacacctatccacctgagggagggactgtcat

SEQ ID NO: 5188 - DNA, 337 bp, Bos taurus
  Clone ID: 35-LIB34-073-Q1-E1-A4
aggtaaaaattttttaatctgagccattttttgagattttcttgaggcatggctgattgacaatattatataaattaactttcaggtatacaaagtgatttacaatttttaaacattatactccatatacagttgtatcggctattttccctgtgctgtacaacaaatccttgtaccttaattgggtttttaatttatttatttaattaattttggctctgctgggtcttcatggcaatgcgggcttttctcaaatggtgggaaccaggggctactctccagttggggcacgagggcctctcactgcaatggcctcttgtggagcacaggctctaaa

SEQ ID NO: 5189 - DNA, 390 bp, Bos taurus
  Clone ID: 35-LIB34-075-Q1-E1-A12
agtcgtattagtggtgtttgtcttgcttatctagggctgctcgatggtggtctcggcagggtccggagttcacagaatatgcccggaaagcaggactggtgattcctcaagaaagtttggaacgtcccatacatctggcctgtacagctagtatctttgatgcctatgttcctcctgagggtgatgcccgagtgtcatctctttctaaggaatgactggcacagaggactgagcgattgaaagatgaatgtggcatcacaattgtcaatccggaggataaaagaaagtgattctaattttaaagtagaggacttccctgaaaaagcctaggatatcttcattgaagctcatctgtgtctaaacaactcagaccatgaacgacttaatacc

SEQ ID NO: 5190 - DNA, 105 bp, Bos taurus
  Clone ID: 35-LIB34-076-Q1-E1-A4
gtctgttcgatggtgggggctgattcgtgcgtctggctgtgctctcgccttgctcgtgatttggcggtcaggcttttggcagtttttcggccgacttttgagctc

SEQ ID NO: 5191 - DNA, 406 bp, Bos taurus
  Clone ID: 35-LIB34-083-Q1-E1-A4
aagccacgttgggaacaccaaagacatccttttcttgtgcagtgtgacgccctcttgatatcacgacttctcagagggcatccagatagggagataaatgtgcacgatggctgtctgtctgctaggaattactgacttacaaaggtttggctgactaatgagaatcccataggtcacatcagtaataacatgatcaggatacagatgatggcttattattcagatgattgcactacataggtgccatgtcaatcatttggttttgcccctgcctttcaacaccttgagatgaagtctgaggcacagagaggatggttgacgtgaccaaggccacatagcatattagaggcagggacacgtgtacaatgtactcaactgttaccaagcccagcaacaccactttctg

SEQ ID NO: 5192 - DNA, 434 bp, Bos taurus
  unsure (152),(288): unsure at all n locations; Clone ID: 35-LIB34-084-Q1-E1-A12
aaagttctagatcgcgagcggccgccctttttttttttttttacagttaagtacagtgctttgcaaatttattgaaagtcatgtgcatgtttgaaatagttctgacatgagattaattacaataaaatagtcaactccagaatttcaggtanaaagtgcttatgttagacataaaatcaatgtttgaattaaaattttgcttcattaaactgtgtttctcatgctataatgcaacttttcaaagtcaagcaactacgtaacattaatatgcttcctcaaaacttacanacttacgttaacaaccagagtcagagcttttaaacttctacatatcagcagggtcaaacgccaaaaagagcacaaagctacaactgcagcaacaagtcctaaaataaatgcaaattttagaaaagtaaaccaaagagtattatcag

SEQ ID NO: 5193 - DNA, 288 bp, Bos taurus
  Clone ID: 35-LIB34-085-Q1-E1-A4
attccctaggcgacccacgcctccagtgaaatgaaggtttaatttgttaacacgggggaatgactggataatcatcaggatcctgagaaagataattagttgctccattcatggaagcatttgagatgacagcatttgagattgttcagctatgtggcatcatgttttataaagtttgttttagttgtatctgttaagagatactaacttttggattctcactaacaaaatggtattagttttgttattgcctgtaatggccaaagtatagatacaccttaaagtact

SEQ ID NO: 5194 - DNA, 296 bp, Bos taurus
  unsure (230): Clone ID: 36-LIB34-001-Q1-E1-A8
atggatatcaattttgtacctttaagaacccaatcttcagtacccatttttacttgggagtgagattactggcttgattgctctctccccctttggactctcctttttctccaccaggtcgcctctgtctcctccctcccccttctcttctctacccaactgtctgaatctctttgtgtgtcccgcatggtggagaacacttagggaattgataactggttggatcggtnccccaactttggatcccccccttaacctccctgtgaactaacctccttctccctccttctcttcac

SEQ ID NO: 5195 - DNA, 399 bp, Bos taurus
  Clone ID: 36-LIB34-005-Q1-E1-A8
accaaactttacttactcttcccttctgcctcctgtgggtgcttcacagtttttactgctatgaatatttccctgcactcaactttcgatttgttaagtttcttttcaatgaaggtttaggtgggaggttactgggattatttcaagagcatgagtaaaacatcgtgatacaagacacgagagtggatacgtaaggaaatgcctcacatctagtcccatgtcatccctccagtagtgtgatttcagcatgtcacatagcccgccaaagattactttcttcttgtaataatgatcgtagacaaacgttttgagcacaactgttattagtgcaatttatcaataaaacactctgtcaagtggcacaataaaaaaaaaaaaaaaaagggcggccgctcgcga

SEQ ID NO: 5196 - DNA, 294 bp, Bos taurus
  Clone ID: 36-LIB34-019-Q1-E1-A12
ggccgtaccttcgtgggttcagggccatcgctgcttagcaacatgcatgctgcaccaccagctggccatcgttaccggtgggggcactggcatcttgaaggccttcgtgaacgagctccttcatctgggatgttacgtggccattgagtcccgtaaatttgataggttacaatctgctgcatataaagtgaatgccagtctgtctcctatggtccaagttcaaattactcccataatctgttacatctgtaatgaaaatgatgtaaacaatttggtcaggtccaccttagatat

SEQ ID NO: 5197 - DNA, 145 bp, Bos taurus
  Clone ID: 36-LIB34-023-Q1-E1-A8
aggacaaggacgcagctcgccgtccatcaaaccctcgcgaagctgcaccggtgcatgtcaccggacccagaggcaccacatgcacgtcgactcccagcggaacgctgttggcaatgacgtcctcccactgggtgttctccagatc

SEQ ID NO: 5198 - DNA, 240 bp, Bos taurus
  Clone ID: 36-LIB34-024-Q1-E1-A12
ctacaatgactcgtaggatggatgttccttcttggtgaattgagtcttggaaatcctttaattatctgacaccatggaaatcatggcaatactgggcggataccacggagggtcataactatgattgtgtttgatgttaccatatttcaaattacatcttgatgaaaaaagagtaagtctggaatttcaggagcttttgtgcaagagactgagactccacatttaatcttttatttcagt

SEQ ID NO: 5199 - DNA, 174 bp, Bos taurus
  Clone ID: 36-LIB34-028-Q1-E1-A12
tcaagccacgcgaccggtgacactcactgattatcaactcatgcatatctgaatttgacagctgcctaacttagattgactggcaaatagctttgtttctgatgtgctaactagaaatacatgggtccagttacattaattatataacccaaacctcactaaattgggcgcaca

SEQ ID NO: 5200 - DNA, 351 bp, Bos taurus
  Clone ID: 36-LIB34-036-Q1-E1-A8
aattctccaggcctcagcctgtttcttagcctgggatctgcgcaggattgagggacccacaagtcaaccttgagacctttggcaagtaaaaggggaagaaaggggggtggggggaagaaaggaggtggtggaattaactgtggagtggggtggggaggggatgaatgaaatccacgtctggaggggtggagacggagtggaaaaacttcagaagatagattttggatgtcaggcctggagggaacgggagcaagaagaaagatctccacgcagtcgctgatcacctggaaagggaccgaaccccacaccccagctcttcagcccctgcctcagccctaacaccagccttga

SEQ ID NO: 5201 - DNA, 332 bp, Bos taurus
  Clone ID: 36-LIB34-039-Q1-E1-A8
agaaccacttaggcatgcactcattcaaaccagacatcttacaagtgtctgcaaggtgagactagaatgatctcacgttacaaatgagcagagggacttagaggaagtttagggagtctgcccagggacttccctggcagtccagtgggaccaatgtaggggatgtgggtttgatccctggtctgggaactgagatctcacatgctgaggagtgactaagcccgcacacctcagctagagaatttgtgtgataccacgaaagatcccacatgacacatcaagcgatcctgagtgccccagccaaggattgacagaaccacggtgcagagcta

SEQ ID NO: 5202 - DNA, 119 bp, Bos taurus
  Clone ID: 36-LIB34-043-Q1-E1-A8
acggacgcgtgggtgctagcggaacttgtacacttacagtaattcagaattagtaaggagaacagttcaccagtgtttagttttatattgaggtgctcaggttggaataaagtggtatt

SEQ ID NO: 5203 - DNA, 236 bp, Bos taurus
  Clone ID: 36-LIB34-054-Q1-E1-A8
cggacgcgtgggctgaagggtagaaagaaataccaaagcaaaggctgttttcttgctttcattctttctgtttttattttccttctttttattttttcttaagagcgagcggcgtttgcggtggcagtttggggtgggcgccgccgaggtgagggggtttcgcctcccgcacgctggtagactgttccattatggatggaggggatgatggtaaccttgttatcaaaaagaggttt

SEQ ID NO: 5204 - DNA, 219 bp, Bos taurus
  Clone ID: 36-LIB34-058-Q1-E1-A12
gcggtccgtggggtcgcggagagttggacgtgactgagcaagtgaatgactgaaatgaagtgatgcttggagctgttgcagtattagtattagtaatagtaatcttatcagtattaggaccagagtcatacaccaaggatggaaaagcataaacagagaaggattctgggtcacagatgatctctcagtatgctgaactagtctgggctgcccacctct

SEQ ID NO: 5205 - DNA, 237 bp, Bos taurus
  Clone ID: 36-LIB34-060-Q1-E1-A8
cctttttctatgatgtgttatccatcctaaagaaatactgagtacttctatacgtgggcgtagaggagtctgcagattctgtagcagaaattaaagtgactgtgaacatcaagaatggagatgattatgcattttaacccttaaataaaccaataagaagtgcatcatttattaacatttaaaaccgctgtagaggtctcctggttttgattatcaatgaaagtaaaacacactgac

SEQ ID NO: 5206 - DNA, 317 bp, Bos taurus
  Clone ID: 36-LIB34-061-Q1-E1-A8
aggagcatccacttcatcctgaggatgcattacggattgggtaacaaagcacagtctctccctcaaggactgttttgttttcatggaaaaattcagacattacataaacagagaggatgatataatgtcacgtacatatcagcagcttcagtcattatcaacatggggccaatataattattccctacgtcctaacccctttcctcttttgggtttgttttgtagcaaatcttacacatcctgttattttaactctaagaatttttaaaaatacttaaaatggcatatcacacttaaaataaacataattctttaat

SEQ ID NO: 5207 - DNA, 238 bp, Bos taurus
  Clone ID: 36-LIB34-063-Q1-E1-A12
cccacgcgtaacaatttcttgcaacttcgcatccattttgaccatgtaacatctattaatgcgacatttctgtgcttttatagttcatgcccaatttcctattgactaagattaaggacacgatcatcgacctaatgtaagtttgggtgtccgctatcatcggcccaatgacaatttgacagtatatgcccctatctgagacctgtgtccctcccactaactgctgtggatatcaggc

SEQ ID NO: 5208 - DNA, 83 bp, Bos taurus
  unsure (26),(30),(38),(41): unsure at all n locations; Clone ID: 36-LIB34-068-Q1-E1-A8
gtacaaggtccggaaagttcccgggntcgnacccaagncgntccggagaaaaagaaaggaaatcaatgggaaatttaaggaac

SEQ ID NO: 5209 - DNA, 240 bp, Bos taurus
  unsure (210),(230),(232)...(233): unsure at all n locations; Clone ID: 36-LIB34-069-Q1-E1-A12
acgaaaaattaagctcggaatattagaacgataaatttatgagtgttgaattatgaatattgattctcctaatttacttttggtaaccatttgaaaacatagaagttaaggataaggacttgcctggcagtccagtggttaagattctgcacttccaatgtaggggtctcagctttgatccttggttggggaaactaagatcccacatgntttcacaatcaatggacaananntaaataa

SEQ ID NO: 5210 - DNA, 215 bp, Bos taurus
  unsure (189): Clone ID: 36-LIB34-069-Q1-E1-A8
gggatttactaagactgaaaagttagtagaaaagctaagacaaaagtctagtttaacaggctactcattcagtgctttccccacttcagcacaaggagttttgaaagttttaatacatggcttttgttattcctaaaagtcagctcttgggagaagcattaacaagttggaaactatatactcgcaacngtgagagctcctatctgtattatgtg

SEQ ID NO: 5211 - DNA, 195 bp, Bos taurus
  unsure (111): Clone ID: 36-LIB34-070-Q1-E1-A8
gagaacgtcctgggcctgatctcaggttggggtcgaacaaatgtcaaaagtcatgttattaagctcagaggggcaaactacccgttgctccttatccaatgcggagataangggtcatctgaataatacattctttgtttcactgaaaatatctgtccggtatgaaaggtgttacagctgtacgggacatggtgg

SEQ ID NO: 5212 - DNA, 356 bp, Bos taurus
  Clone ID: 36-LIB34-072-Q1-E1-A8
acggacgcgtgggttctagatcgcgagcggccgccctttttttttttttttttttttttggaactatgtttttatctacgacagcatacaacgatcactttcataattctgcaatactgcctcagattcccagttgcaaaaccattgacctttacatttccttagcatccatttatacaatgtgaatttgttgctgctcatacaataagaagagtctttacctttgatgcttcagacataagtaaacagaagtggataactctgggcctaagacagatgtggagtataaagagcacagaaccctaccaatacacattgtctaactacgcaccatttgaagcattctggaacctcaa

SEQ ID NO: 5213 - DNA, 352 bp, Bos taurus
  Clone ID: 36-LIB34-079-Q1-E1-A8
aaatagttcatcatttcagtcacatatacttaattgacattacattataatattaaccttttcctatatggaggatctatttaatattaaatgttcttaatgaaatattgagtcttggcttttcagcatgtacatcttcactgtcatcccagcagagacattatggggtaccacatacattatgccgtttatccaaactaataatttagatgagtctgtattgaacacacccttactcataaattggcttagttacattcgaataaattatggctacactaatttatagataatctggaagataccttcacattttaatcaatttaggatcatgaagagccgacaaatgcca

SEQ ID NO: 5214 - DNA, 236 bp, Bos taurus
  Clone ID: 36-LIB34-080-Q1-E1-A8
cggacgcgtgggcgcgagcggccgccctttttttttttcatctgaacataattaaaatttaaaaagtattgtgatatcaagcactttaacatatgtatcagagaaactgatgtgggtttttcaggttttggagtacatttaaatatgacttttcatgctttgttctttacaaataaaactgtggggttgataaaaaaaaaaaaaaaaagggaggaagcacaaaaagataaaaatcg

SEQ ID NO: 5215 - DNA, 262 bp, Bos taurus
  Clone ID: 36-LIB34-083-Q1-E1-A12
agcggacgcttgggagctacagatatccacatcgtcgacttcgcgttcattgtggtaaagtgacatatccagtgcgtgagtcaacttcactacgcatgaaggatagacggcacaattaacgatttctgtacttagctgtcaggttaaattttctcagtgaggtctttggtggaaagagatgtgcacaagctcctcaatggttagcgtctggccacagtttctcacatagtactacgtgtggacaattccttagataccgtgc

SEQ ID NO: 5216 - DNA, 397 bp, Bos taurus
  Clone ID: 36-LIB34-085-Q1-E1-A12
agggaagtaagtcaagtcacctccccttcaaagctccagagtacacaaatggtctgttgctcaagataccaacactgatgaccttccccacaagacagcaagggcttgtttatgactaaggaagaggtggatttcatgaatgacccaaaggaagctcccagcagagttcctacagtttgtggtggtggggccttgctgatcggtctttagtggacacctgtgtaaaagtatgggctgggtctgctctgaaaaaaaaaaaaacaggcttcacttcaggttttgccccgttgtgggtaatgaggcggaccttttgaggttatttcagcttgttttggttcaagctgaccttctgtggtggttagctgaagaataaagattctgaagaacaggtctgcat

SEQ ID NO: 5217 - DNA, 233 bp, Bos taurus
  Clone ID: 37-LIB34-001-Q1-E1-B2
ggtcgacgacccgtccgattaaatattgagtcacaggggagaagcacacattttaaacattgcaattaggttagctttgaatttacactaagtgacaatgtattacaaactcacaagttttacgttgcctggtggtcgaaatggcagttttccttaaatccaattttaaccggtttccagaagtttttttcccccccaaaaagggacttaaatttaattgcctgggtattata

SEQ ID NO: 5218 - DNA, 396 bp, Bos taurus
  unsure (287),(362): unsure at all n locations; Clone ID: 37-LIB34-004-Q1-E1-B2
tcaggttcggtcaccgataagcctgcgagccagggtaactcaggaaggaaagatgatgggtctaagccgacacccacgatggagacccagccggtgttcgatggagacgaaatcacagctcccactctctggattaagcacttggtaatcaaggactccaaactgaacaacaccaacataagaaattcagagaaagttcactcgtgtgaccaggagagacagagcgccctggaagaggcccggcagaacccccgcgagggcattgtgatccctgagtgtgctcctgngggactctataaaccagtgcagtgccaccagtccactggctactgctggtgtgtgctggtggacactgggcgtcngctgccggggacctccacacgctacgtgatgccc

SEQ ID NO: 5219 - DNA, 413 bp, Bos taurus
  Clone ID: 37-LIB34-006-Q1-E1-B10
cttgcctgtggcccgtgggatcctgccttgtggggtacgtccctgagagggcggtcatcccactggtcccccactcggtgcaagcctctgaggggccccgggcagggggatgaactccatgtgggtaacggggcaccgaggcgggtccatttgcgctctgaccagcagagctgagacatcgggcactttctggatgacagctggtcccctttgagccggaggaacaggcgtgcccgccctgggtacgtcgcgtccctgtttgctagaaagcccggcggttcagaggccagccacccgtttctcgcacttgctgtgacgcgtccatggagatgtctttccggttctgctctgaccacatcagtcagtagtgccaggtgagaagccccgccagccacaggcatcctgtcaccccg

SEQ ID NO: 5220 - DNA, 294 bp, Bos taurus
  Clone ID: 37-LIB34-008-Q1-E1-B2
gttcgagatcgcgagcggccgccctttatttattgttttttatgattgttttatattggtctattttgttattcattattgagatcatccggtgttctatggatactatatcataggctcattctctggattaagcatttggtaatcaatgactccaaactgaacaacaccaacatgatatattcagataaagttcactcgtgtgaccaggagagatatatcgccctggaagatgcccggcaaaacccccgctagggcattgtgatccctgagtgtgctcctgagggactctat

SEQ ID NO: 5221 - DNA, 296 bp, Bos taurus
  Clone ID: 37-LIB34-009-Q1-E1-B2
agctcctgggcagccggcgtgctgacgctgagcacatgtcatccagacaccctccttcatgctcatccgactgggattcagtaacgacaacatgactctggctgtggggatccacttcatgctcatgatagttttggcctgcatgcccagccctgtgatccacaggagtcccaacgacaccacctgctgtgctcatgggcctacagactgctggcgtcatgccgtcagccactatcatgaccatgacctccttcgcatccagtttatcggtcaccatttcctcttcaatacacgct

SEQ ID NO: 5222 - DNA, 428 bp, Bos taurus
  Clone ID: 37-LIB34-010-Q1-E2-B10
ggactgggtgtgggagcagatgggttccccgcagggcctgggcgagctgcaggtggagcggtgagctgccggactcctgcctgccaacctccctgcccagccccagcaagactgcaccctcctaatgacaacgcactccactgttactcacaagaccaagggatggacacactgttcccaccctccccagatggctcctggctccctgagaggcagcagtgtggtacaggaaaaggccctacataagaaacctgggtccctggccctggggcaagtccctttccctctctgggcctcactctcccgcaggacggggagggagctagactcgggccagtgcccggactcctctcctggaatgcccaccccaagggcctcattcactcctagttgtgcatcaaatccagtggcaccaccattggtataac

SEQ ID NO: 5223 - DNA, 331 bp, Bos taurus
  Clone ID: 37-LIB34-013-Q1-E1-B2
tccacccacgcgaccaactgcgagacgactggagacgacctcatcggagtcgactccctgcgccagcccgtatatggacgcctcccggtcactgggcatggctgcgcggtggctccatggttgtgacgatgctgggaatccagtgttcagccgcggccatgaacgctatgactctagacctgggacccggtctgatgcacaaattcatctggctgggtacaacagacaacgccttgctcacctgcggattacagcagttgctcagattctagctcatcccagccagatgctcattcgtcctgtacataaccaactgggacctatatacagc

SEQ ID NO: 5224 - DNA, 363 bp, Bos taurus
  Clone ID: 37-LIB34-014-Q1-E1-B2
gtccgatgttaagggacactggtaggttaccggagccctgcactcacatttcccatgttaccatcttcccagattagatactttatcatgggcttgttggtactaaaggtggggaaatagaaagaaccccattacctgtgtgttgtctggctgcaccacagatgagttctgccatgtatccacacatacgaaagtactgcctcaccgctagtgtcaccagcactcgtcttaagaaatacctttattcagtgtttaaatttctttgtataaatgataactaaacttgaagccactgatgcactgactatctcttattttccattttggattttaagtacagttgaccctaaagcatcatggggg

SEQ ID NO: 5225 - DNA, 274 bp, Bos taurus
  Clone ID: 37-LIB34-016-Q1-E1-B2
gtccctctcaatagcattcagttgagtcgcacgcaccctcaggcttctggcatcaacataccttcaagtgctttcgacatcatgcaatgtcaaatattaccacctcgctgtcactgcagcatcttagcttgaagatttgatatttactgcacatcaaccagatggattggtaccttcatgacttaggccctctctactgtcaagagatgtatactagcattcgtacgcatcatagatccggtatatgacagtgcatcaaataccagctagctga

SEQ ID NO: 5226 - DNA, 403 bp, Bos taurus
  Clone ID: 37-LIB34-017-Q1-E1-B2
ggctgccacggacgccctgctccgacacatgcagctgctggtgtttctcctgactctccccctgcaactcacggatctacagggtttctgggaccctctgtccaagacctatttcaccgtaactaagggctgtgctgactgtcaagaacaaccgattgatcgacagcactaaacgggaactcctcatccatgatgtatgggctggtaggtatctcaaggaatgtggacctgctagacctgggctgcagtatcggtgccaacttccgcttctacccagctggctataagattacctgcctgaaccccaatcctcacttctacaacttcctgacatgtatcacggtcgattacacgcatctcgagtatgaacagtttgtagtgcctttcggagatgacattatac

SEQ ID NO: 5227 - DNA, 81 bp, Bos taurus
  Clone ID: 37-LIB34-031-Q1-E1-B2
gaactagttctagatcgcgagcggccgccctttttttatttttttttttttattttttttttttattttttttttttgttt

SEQ ID NO: 5228 - DNA, 407 bp, Bos taurus
  Clone ID: 37-LIB34-032-Q1-E1-B2
gcgtattcctcatctgcagaatgggcacaagttaaattgcttcataacgttacgagaaccaagtaagatagtgcacttagcagtgctgtctgtggttagggctgtgtgaatgtagtgctcttgctttttctctttccaactcccccctcccttttttctccagccagtcaaatgtaagtgacttagtctttcattaccttgtaccacatatcacagacggatatgataactttagcatgaatttaagttagtaattgtttttagagatattttcacttttaaaaataaaacttctggagtccttgctttaacctagagtaacgaaagtctgatgtatcataggccagtggtcattggctcaaatcctgcagccaaataaatgcctgttccacttaacttgaagatag

SEQ ID NO: 5229 - DNA, 284 bp, Bos taurus
  Clone ID: 37-LIB34-043-Q1-E1-B2
ggacctagtagacctggaccctgatgtagatgggacaaagcacaacgccactgagatgatctgggctgtgctggcacccttcaataaatcttatcacctgtcgggtttctccttttccattgctggccagtgactatcatcgacacaatcaccgatttttgtgtgatgacatgttttccaccatttttttttcccccttgaatcaaatttgtcatttggggaaagcaccttcagggcttctccatagaccttgtctcttataaccaggctttaaatcccccaaa

SEQ ID NO: 5230 - DNA, 247 bp, Bos taurus
  Clone ID: 37-LIB34-051-Q1-E1-B10
gcgatttcaccactccagctctattttccaatccttcattcagcatcgtttataatttccattcatttaaactcaggaaaccacaagagctcagcttttaaactaccaatcaagtctaaaaatacatcatcagctaccgtttttgcaagtgtaaaaactaaacagatcagctttctacagctacccagaaccaagagattattttaagttactttacagctgggctattcgcacacttactgtggag

SEQ ID NO: 5231 - DNA, 223 bp, Bos taurus
  Clone ID: 37-LIB34-057-Q1-E1-B10
caggatcgtagtggtaggtttcgctggaggaaccattgcttctgtaccagccaatctgctgctgctgaagaatgttagtgccatggggctgtactggggcagataccggcagcagaactttcccgtcttctccagaagcctgtcctcagcacttcagtactgccaagaagggcgcatccagccacacattggagaggtttttgaactggaagaggtcaatgat

SEQ ID NO: 5232 - DNA, 225 bp, Bos taurus
  Clone ID: 37-LIB34-057-Q1-E1-B2
acgatcagaataactcctaaggactctcgttgggttggtgcttggtggcttggtttccatgcggatggactaagagccattatttcttctataccattctttttcttgcccaaaactttgaataaaccaaatgaagaaaaaaaagcttcagcatcctcagtatctttgcctatgaaaaatgaagaaaagagtcaaatggctagtttgaccaagactggacaaaat

SEQ ID NO: 5233 - DNA, 233 bp, Bos taurus
  Clone ID: 37-LIB34-058-Q1-E1-B2
acctccattgagaggccctgtacccagatagttcaagagccatgctccaggaggcacctctacgaatggaacgcactgctgtcaaatgcagcatgatgtaaaatggtgtcaggtaactttctgcggctatcgacatgtcagacgagactctgtatctcatcagagcaggcttatcactatgaagtctcaaacagcctggaagtagtattaatggaactgtgaaccctgtgagc

SEQ ID NO: 5234 - DNA, 418 bp, Bos taurus
  Clone ID: 37-LIB34-061-Q1-E1-B2
aaaaagaaataaaattctctctcttttttgaaatggctttatagaaacataccttttagatttcctgaaatttgctctgagggcaagtgtcctaacaccagtggatgtgtgctgagccctggttttagaagcacattctgaagtcatgactcctcatgtgggtagaaagcaacctgacctgtgtctggggctttccatctaccacctccatcacttgcctctaagactgcttctcccgtgatggggagttccagacaggtgctgaaaaggctctgagcccatttcattggttgcaggaatgccacagatggtggaggaagtcagcaaacacataaagtagccagagaagagagtcatcaactaattgcaaaagaaccaacctggcggtgaaaatggactttacaaggtaaaaagaaaa

SEQ ID NO: 5235 - DNA, 211 bp, Bos taurus
  Clone ID: 37-LIB34-062-Q1-E1-B10
ccctttgtctgcagaagtgaggggctaatgtgtctttctggagattatcgtgtgacctgggatcccaggattaatacaaggatggacaaacaaggagaggtctgtaagggagaggcagggcccggacccttccctggggacatgtagcatctccctcaccagaaacctccctgccgtcttccctctgtcccctcctatagagtcactaccc

SEQ ID NO: 5236 - DNA, 211 bp, Bos taurus
  Clone ID: 37-LIB34-066-Q1-E1-B10
acgtcagccaggtgtctgtcactcctcacctctctgtcttagcctttcattccccgtatctcccccgcaggctgctgccagctcccctccaagccggggatccatctctgctgagaagcctcccccttcccaagaggacttcctcatctcattatttacctcccaccaccaccgacccactgctgccctggcctcagtgtccccagacatc

SEQ ID NO: 5237 - DNA, 198 bp, Bos taurus
  Clone ID: 37-LIB34-068-Q1-E1-B10
agttttaccacaaatcaaatataacgactcagctgtgcatgtgattttttgcacaaggcaggttggcataactgttgcaatataacggtatagtgctatattaccctttcccctgccataaccacttgtttccgacaatctctgtctagctcaattctgtagtgagacaaggacgcctggtcccaaacattattcctc

SEQ ID NO: 5238 - DNA, 222 bp, Bos taurus
  unsure (187): Clone ID: 37-LIB34-069-Q1-E1-B2
gcctgcaggaatgtctgaagccgaagaagcctgtctgtggcgtgtgtcgcagcgctctggcgcctggcgtccgagccgtggagctcgagcggcagattgagagcacagagacttcctgccacggctgccgtaaaaatttcttcctgtccaagatccgggcacatgtggctacctgttccaagtaccnagaattacatccatggaagggtgtgaaggccacca

SEQ ID NO: 5239 - DNA, 416 bp, Bos taurus
  Clone ID: 37-LIB34-080-Q1-E1-B2
aatctacagaccgttataaatacactgaatctcctggggcactaaataaaattgctggatgagcagaccccagccagacctattgtattcaaatcacaaggtataggattgaggaatctcttttacaaactccacaggcaattatttgtgctcaggtttagaaacctcttatattcaaaatctgagtcttctaggcaattgttaactattattttgaacctatattaatgttaacttttgatataaaagtaaattcaaacttaaagatggtagttactcaaccatttaaatttttattgctgatagagcttttacatactttcataaagaatgattttaatctaaaatgttacgtgttcatatttgtagataaaaaatttaactagtatttactagaaagtatagtgaagatgttc

SEQ ID NO: 5240 - DNA, 463 bp, Bos taurus
  Clone ID: 37-LIB34-086-Q1-E1-B2
gggaagacccacgcgtccgagacacatgggctacagaagttggccctgttctgagtaaaagcacgccaaggctaataacaacctgggagaaagttccagttgggaccaacggtggagttacggtggtgggcctggcctccagtcttcttggtggaacctttgtgggcatcacttacttcctcacacagttggtttttgttaacgatttagacatttctgctccccagtggccaattattgcatttgggggtctggctggattactaggatcaattgtggattcatatttaggagctaccatgcaatttagtggtttggatgaaagcactggcatggtggtcaacagcccaaggaaggaagtgaagtacatagccgggaaacccatcctcgacaacaatgccgtgaatctgtttacttctgtcctcgtagccctcttgctcccaacagctgcttggggtttttg

SEQ ID NO: 5241 - DNA, 371 bp, Bos taurus
  Clone ID: 38-LIB34-004-Q1-E1-B10
agatccgctgaggctgtcgctgtcgccgccaccgccgacccgcgctccgtgacccgcgaccccagaccccgaccccttttagatcggcccgcgcgccccaagcccggcccgggcggcgcgacgggaggatgagcggcgggcggctgaaggaggagccgtcgcagctgcagctggccaacggggccctcaaagtctctgtctggagcaaggtgctgcggagcgacgcggcctgggaagacaatgtcactcgggaatccgcagggaacggctgaagatatgtccccgcaggcaggtccccgggcctaacgacaaggcagagctgagttcgattccagctccgccttgtaagtccagcaggatcgtgagatgaa

SEQ ID NO: 5242 - DNA, 319 bp, Bos taurus
  Clone ID: 38-LIB34-005-Q1-E1-B10
cctatgatatgctcatatttagtaaacactggcgttatggaaggcatcctggttttttataagcattgtgcatttatatgaatctatctgtaattaacttggtgtagaaagattacatttactgcatattgtatccatttgggtcagggagatttctttgcgttaccttttttaaatctccttagttcagtgcacacttagggtactcaccatgtttgtagtaagtattggttgatgacttatcttgatcgactatgatgcactatcaagttatatatcaagaagttctctggcaacggcttctgtgggtgaattgcaa

SEQ ID NO: 5243 - DNA, 414 bp, Bos taurus
  unsure (396): Clone ID: 38-LIB34-006-Q1-E1-B6
ggaatagaagcacaacttgctgtagctatgtagtagaaaatggggattaattccaatttagttgccaaaagaataagattgaaaaggtaagggaaaaggagttaaaagtattctagggcaagcacataaacaacagcaccaaagtgcagagttcagagaaagcaattatgtgaaagggtggaagcaaaggatgaatgtagtaactgaagcataaaaaaaggatcatattattggggggtgggggtaaatcttgaatacctaagaattcagtatgagaatctactgacagtttttcaggagggaaaagataatgttttcagaagacagtatggcagacccatgaaggatgggttggtaaacagaaaaatcagttaagagtgtttatagtataagcanagaataacaaggttctga

SEQ ID NO: 5244 - DNA, 412 bp, Bos taurus
  unsure (285): Clone ID: 38-LIB34-008-Q1-E1-B6
tttacttttacttttttttatttttaaccattttaatatttactttaacatgctatattaaaccacattctccaaacacagtcttcacatacgttaatcctttccttaactgtacccattctggaacttctcacttactacagtctaaaacaattgtttcaagacttttcaactcagagttccatagatttctctcctgctcctttcattcctgcatcttgattgggtttatggaacgttgatctttttaaaatgtgtgtatccactaggactctcattttttanacttttttgtaatttcagtgttatttcatatgcactggactcagttctcttgttcatctgcttgctacatagattagcattataatccttgagggttaaaatttctgtgtgcagctcatctggaatg

SEQ ID NO: 5245 - DNA, 399 bp, Bos taurus
  Clone ID: 38-LIB34-010-Q1-E1-B10
ggactgggtgtgggagcagatgggttccccgcagggcctgggcgagctgcaggtggagcggtgagctgccggactcctgcctgccaacctccctgcccagccccagcatgactgcaccctcctaatgacaacgcactccactgttactcacaagaccaagggatggacacactgttcccaccctccccagatggctcctggctccctgagaggcagcagtgtggtacaggaaaaggccctacataagaaacctgggtccctggccctggggcaagtccctttccctctctgggcctcactctcccgcacgactgggagggagctatactcgggccagtgcccggactcctctcctggaatgcccaccccaagggcctcattcactcctagttgtgcatc

SEQ ID NO: 5246 - DNA, 383 bp, Bos taurus
  unsure (6): Clone ID: 38-LIB34-013-Q1-E1-B6
attcgncggtcgacccacgcgaccggcggtgagaggcccggggcctacctcagcggagcgggctcgccgcgccagctagcagcgggccgcctcccggtccccgggcccggcggcgcggcagctgcatggttgtgaggatgcggggaagcgagtgtccggccccagccatggagggtatggacgtggacctgcaccccgaactgatgcataagttcaactgcctgggcaccacggacaatgacgtgctcatcaccgagtttcagcggttgctcggcttccagctcaacccggccggctgcgccttcttcctggacatgaccaactggaacctacaagcagcagttggcgcatattacgactttgagagcccagacatcagtgta

SEQ ID NO: 5247 - DNA, 435 bp, Bos taurus
  Clone ID: 38-LIB34-014-Q1-E1-B10
accacccccagatggtgacaccacaccttcagctctgcgggcctctcagaatcactgcccagaacaaggaccatggggctgaattttcttttaaaataattggaaccagtttatgtcctggcccaaaacaaattgttcccaagcccgtgtatctaaaaatgttgggactcccccagcagtccagcaattaagactctgcgcttccaatgaagggggcatgggttcaatccctgatcggggagctaagatccctcatgccgtgaagcacggccaaacgataaaaatacaaatgataaaatgttaaactctgcctaaatatattgcagtgactttaggtagaagtgtcagagggcaacacgacctggtcagactagcacggtgtctgctaactgtctgctttaggttagcctctcagagaggggaacagtgccccac

SEQ ID NO: 5248 - DNA, 371 bp, Bos taurus
  Clone ID: 38-LIB34-015-Q1-E1-B6
gttgtagaaaaattgttgccacattcctacaaccccagaattcatgtccttctcactgagggatgaacatgtgctgcctgaaataaccacatggtgatgcccatctctctaagcaaagaaccccaatgctggtgtatgtgatttgttatttttccctgggaagaatttaggcttccctctacatcagttctaccctagaagaaggggaaaaccccctgttaaaagtctgagagttagtaagattacttcagactgaatatttaaacattgcaacattattagctaccaatgttgaagaacaagttggggaaaatgttaatttctgccaatcaattttcaaaatgaattgtgacagatgaagcctcctaatt

SEQ ID NO: 5249 - DNA, 405 bp, Bos taurus
  Clone ID: 38-LIB34-016-Q1-E1-B6
cggacgcgtgggtaaaaaaggaaattttatagctgttgtcattcaaacacctaaacgtatatagcatttagtttttaaacacactacttgtaaagaaatcatgaagtagattggagaactaaatcataagcataaaaatatttttacttttttactttcaggaattgttccatttaaataaatattaaataaatatttaatcactactttgtaaaaatatagtgggatctccttttggtcattggttttaggggttggtttaacactgtatggtattgtttgcattgaatgaggcatgactgggtcattttagagtttatattgttataaggctcttcataattcagcaggagcatttatccataaaatctgattatggtttaaagtttactagaagacatgcat

SEQ ID NO: 5250 - DNA, 393 bp, Bos taurus
  Clone ID: 38-LIB34-026-Q1-E1-B6
gtttttgagcacatgttctgcaaagttctgcactaggtactattcagaaagtatacagataaaatgtatctgtcctttaagacttccacttttagcagcttactacagaaatactatcatagaagtgccagtgaaaaaccaggataacacagaggaaaagcccattttttttccttgggaatgattgtggaagacttcatggagtcattggtgtttgagctgagtcttgagaggtcacagaaagaaagggtattctaaggcaaggtgtgaactcaaaaaccaggcattcaagaggtgtatgttccaggaacagagagctgtctgctgcacttgaatgagaacagctgtagggaaagcttgtgttttgagtttcagttgtattccacaagcagt

SEQ ID NO: 5251 - DNA, 417 bp, Bos taurus
  Clone ID: 38-LIB34-031-Q1-E1-B6
cacgaaatatatatactcctaagcagtattattttaaaattcatttaccctgcctatatcccctagcctgtatcctcctctcctccaatttggagacactccatcacaaactttcactttaacggtagtttaaaggtagtttgccatctctctggagccttcatccctggagtccattcactgtgtatcgatgacagaacttttgaggtgcactgttcaactgttaaaatagtaaccgtaaaaaaaatttaaaaaatagtaaccgtgaccccttcagtcaggcccaaactggtgcataatgcatggtacaaggaatatttatgtatttttggaattttataatatttagtaagagtatatgaaaggattgctactgtatcaaagtattctatttcagtttagtctatcctggatatg

SEQ ID NO: 5252 - DNA, 420 bp, Bos taurus
  Clone ID: 38-LIB34-032-Q1-E1-B10
ctgttcttgggccaagtgttcttcctttgttaccaggtctacacaattaatggctttatcatatgaagtaattcagttactcagcagaacaaatgatatacacttttagaaatagctctagaaagtaaacttgaacctaaaagtgtttagtgagaggaaatttctgtttgtctttaattaaaagaaactgtatggaaatgtaagcttaggatgcattaatcagagaagctggcgtcgcactgtgttcttcatttttagttggcatagattgcatgggtgctcattaaataatttggctgaaataactcttgtgatatttcttgttaaatttttgcatctattcagactacaactctgaaaagggaaaaaattcaatctttagggttgaagttttgagccatttattgtaactgaaaatcg

SEQ ID NO: 5253 - DNA, 328 bp, Bos taurus
  Clone ID: 38-LIB34-032-Q1-E1-B6
gtggacagctctaagtcgtaacactctggcatgcatcctataatattcttaatcaggagattctgtgcctgtgcctgatgaacttatcatgctaacatcaattgcacttttcctgtggtctgctggtagtgaattatatacgaattcagtcactgcagaatggctgcaatgacagatttaagaatgcgttaaattcatgtgactcgtgggttcaagccatatgcgaatagcttcacctctcagtttttcaacatttatatcgagctctttgagatccttaatactattccttagctccaattgtaattgagaagctaaatcctgttga

SEQ ID NO: 5254 - DNA, 70 bp, Bos taurus
  Clone ID: 38-LIB34-034-Q1-E1-B6
agttgttttgactctctttagacctgcgtgtacataccttttatttctgtgcatttaaggtcatccagtt

SEQ ID NO: 5255 - DNA, 404 bp, Bos taurus
  Clone ID: 38-LIB34-036-Q1-E1-B10
acagacccttaagttcaagggccagctggcaaggtctgccttcttggaaaaacaggctttcatttgtgattgtcaattgccttccctctggtcctcggtctatgcctgacaaatccagaggactttgactttatagacacattgcagagatatgcagagacttgctgaatattggcacagaaagagctggtagatgatttggtgtttaaattcaggtttcaattgctgtgctctactgctctgatattaactttcaactttcctaggaagtcgaatatgcatagtcaattttgtgttatctcctatcttatgaagaatagctactggtagcaactcaaagtcctcttcttaatcatattgtttcctcctctatgagctgtttgcttccacaaggtcagagtaag

SEQ ID NO: 5256 - DNA, 350 bp, Bos taurus
  Clone ID: 38-LIB34-038-Q1-E1-B10
agagtttgttcaccacgatgagagtcattcatcgctcagcatagagaacatgaatgaagcctcttctctacttagtgccacgtgtaatacattcatcacgacgcttgaggaatgtgtgaagatagcaaatgccaagtttaaacccgagatgtttcagctgtcacatccggaccccttggtttctcctgtgtcaccttcccctgttcacatgatgaagcgttctgtcagccatcctgattcttgcagtacagagaggagtagccactctataaaagaatccgtgtctgcacttcatcgactctcacagcgacgccgaagaacctactccgatacagactcgtgtcatgatg

SEQ ID NO: 5257 - DNA, 406 bp, Bos taurus
  Clone ID: 38-LIB34-038-Q1-E1-B6
gtttcttgcatgggatcagtacttaatcagttagtacttccgagtactggttcaatttagtacttcaattagtattaatcttcagtgaaaagtaaaacataactcaaactgtatattggatggcattttgaggtcctaggacataacctcttaaaaataatagtagttttgtagagtacttgaattactgatgttataattacagtcaactctagaatatcagctccaattaaaggggaacatgacagaggtaaccataatatcatttttattttattttaaacaccaatatgtctgacatgctgggaatttgtagtacttttaactcactgagtagtttaaattgagatgagctccatatgaagatttgatcccagagaagcaagcagaagcttctttctcttct

SEQ ID NO: 5258 - DNA, 430 bp, Bos taurus
  Clone ID: 38-LIB34-039-Q1-E1-B6
cttgtaagagcagggtacatcattgtataaggctttccagtcacagtaaaatttaggaatataacctttatcttcaaggaatttataatggaatacaaaaaaaatagatattatatatgttaaataccagtagatacggcaagttccagatgtgtgacatggattggagccacaagattttaaaagtagttatggggttgtggttgcctggtatggttcagaaagaccttatagagaataaaccagtaagggaattattagcatttgatttggagaagcagagggagtgagaacgattgttcaggagggaagaagaaagaagaatggttaataaatgacagggatagtaattcttaagtagagtgtcaaaccatcctttattttgagggttctagattaatgacctcaacagaatcaatcccagaaatca

SEQ ID NO: 5259 - DNA, 211 bp, Bos taurus
  Clone ID: 38-LIB34-040-Q1-E1-B6
taccggtccgtacattccgggcacaaattaacatacataaataaaacttgaaaaaatcgctcttaaaagatacagagctattagcttttatgaatattactgggcaaattcctatttatcttttaagatcttgttcacatatcacctattcttacctgactacgtgctaaaggtttcctaatgtgctttgcacattatactagtacaatcc

SEQ ID NO: 5260 - DNA, 332 bp, Bos taurus
  Clone ID: 38-LIB34-041-Q1-E1-B6
actcaattaggaaaaagttagcaagccaagattaagttccctgtagcattattttaaattacagtaggtgatcacataaaactctctaatgtttctattacttactctatttcagagtgttaatctgagtcagtgatcattggtgttggaaatatttggcttaaatgtttactttgtttataatattttcttgagtaagatgaatttaatttgtgaaaatctctactgaacaatttttaaaaggagtaattgacaacacttaacattttcaggtattttttaagcaggagagtctctatattgtaaaaagaaatcttaaatatttaatactc

SEQ ID NO: 5261 - DNA, 72 bp, Bos taurus
  Clone ID: 38-LIB34-044-Q1-E1-B6
agtaccgtactagcattcgccggccgacccacgcaaccatattcctcacattacatgtgcgaccgtgctccc

SEQ ID NO: 5262 - DNA, 427 bp, Bos taurus
  Clone ID: 38-LIB34-049-Q1-E1-B6
catgcacagaaaaccgtaagccataagtaaaaatttagcactgtgacttgaacctctgaatcttttcatgcacagaaaaccgtaagccataagtaaaaatgaacaaaaaggacagagaggatcataattttgaaaattagtgacagagtaccccttaccaggggccttcaagattaaggacagaaagattttagaagaaatgtttcttcttgagaaaggagtctcacatgccagaactcaaattataaatgtagtgttcttatgaccaggggaagatgcatctgattcccaaagtgctccagtttagatacgtaaatgctgtcatggacttaagccttaaaggagtgaatactaattttgagcgtatacaaattttcttctctgatttctcttctctttcaaaaaaatgatttgttaaaagcacttt

SEQ ID NO: 5263 - DNA, 226 bp, Bos taurus
  Clone ID: 38-LIB34-051-Q1-E1-B6
aatcattgccaagtgtaaatgatttttagccagtttttaaatcttttttctaaacagcatttgagatgtgaatatttaaggataaacctacgctgcaagatatattcagcttttttggtggtttttaagggtctacatttttaaaatatctttttaaaataaaaactttaaatgtgaaagcttttactttaagctaaaccactttattgtatgtaataaaaaataa

SEQ ID NO: 5264 - DNA, 236 bp, Bos taurus
  Clone ID: 38-LIB34-052-Q1-E1-B6
caccagcggcacagagctcctccgggatgtggtgcccgctgcgcccgctcctgctggccctccttctggcatctgcgtgcaggaccctcggcccgtgggggcagcgtgatgatggcgggggcgagcctgagtccatggagccccggtgggggcggctgaagggcagcaacgcgagtgggcccctgccacccgccgccttccacgaggagaacaccgtcaccggcgagtgggccgcg

SEQ ID NO: 5265 - DNA, 234 bp, Bos taurus
  Clone ID: 38-LIB34-054-Q1-E1-B6
cttgttaacatgttggtacaaatataaatgaaacatagtaagaaaaagtattcccctgttttgctgagtttgagtttcttaaaagatagtagataatacttcatttttacattcagagctatataaggcagcagtctttagcttataaatatcattcagtggcccacactcccaatttctgttcttggcctttgcagtttaccttagtacctacctctctcagttactgggtta

SEQ ID NO: 5266 - DNA, 224 bp, Bos taurus
  Clone ID: 38-LIB34-058-Q1-E1-B6
aggttgaagtcccattaagacactgaatttaaaacccttgaagcctcagggtcaatactatcctagaagtcctttctgacctcacaggaagagtcccagctttcccaccaacgcaaagacccctaaagaaacaggtctcccaagagatgtctgtccctcatgtgggctaacctttggcggctcacacagcacttcatgactggctccctgccttacgtggtggc

SEQ ID NO: 5267 - DNA, 201 bp, Bos taurus
  Clone ID: 38-LIB34-059-Q1-E1-B6
tggagttttcatgtcaccaggacacctttccacctcactcccatctcctccccagtctccttttgggacattacttaggactcgaggatagaaggaagaaacatgttttgtagtgagaaactgagatcagtagctcttatctgtgtcctgttccttcatcagcctctcaaggctctgagccttatggccctcctgcaaccc

SEQ ID NO: 5268 - DNA, 73 bp, Bos taurus
  Clone ID: 38-LIB34-061-Q1-E1-B6
gacccacgcgtccactttttgttttttttttttttttttttttgtttttgttgtttttatgtttttttttgtt

SEQ ID NO: 5269 - DNA, 198 bp, Bos taurus
  Clone ID: 38-LIB34-065-Q1-E1-B6
cggacgcgtgggcgagaacaccagcactttgcagacaatgactgtccaatcccagataggacctccgttgacagattcaaggccactgggctcatccccaaatgccgcccggatgctcactctcccacaagcagcatgtgatggtatcttggccacacgatctaatcaagtattctgctcagtatcgccgtcatcaga

SEQ ID NO: 5270 - DNA, 239 bp, Bos taurus
  unsure (192): Clone ID: 38-LIB34-069-Q1-E1-B10
acagaagagccattgttgagaattagattccacaccgtataaatatccattaacgattctaaataaaggaaactctggtgttgctatgcgtgagatcctctcctgggggcttttttccatagcaattaaaggtgtgctatttgtcagtagccattttttgcagtgatttaaagaccaaagttgttttacagnctgtgttactgttaaaggttttccctttttatatgtagttaaatcaa

SEQ ID NO: 5271 - DNA, 226 bp, Bos taurus
  Clone ID: 38-LIB34-070-Q1-E1-B6
tgagacacatgcttcgctaagactgccccaggaaggccacagaacttgtcagtcttgtagacagccgtgaaatcgtttctggttcataagtagtttcttccctaagagcaatccatggcttacacgagacacatccagcatgtttacgataacaactcgctatgacagcctgctggctaacttaattggtgctgagatcagaattcatttcagttcctgccaggaa

SEQ ID NO: 5272 - DNA, 406 bp, Bos taurus
  unsure (399): Clone ID: 38-LIB34-071-Q1-E1-B6
acggagcctcattctcttagtaacgatacattaatgaggagggctgtgtctttggtaacagatagcacctctacctttctctctcagaccacatatgcattgatcgaagcaatcactgaatatactaaggctgtttataccttaatttctctgtaccgacaatacacaagtttacttgggaaaatgaattcacaggaggaagatgaagtgtggcaggtgatcataggagccagagttgagatgacttcaaaacaacaagagtacctgaagctggaaaccacctggatgactgcagttagtctttcagagatggcagcagaagctgcctaccaaacaggcgcggaccaggcctccataacggccaggagtcacatccagctggtgaaatcgcaggtgcangaggtac

SEQ ID NO: 5273 - DNA, 381 bp, Bos taurus
  Clone ID: 38-LIB34-079-Q1-E1-B6
agggatttactaagactgaaaagttagtagaaaagctaagacaaaagtctagtttaacaggctactcattcagtgctttccccacttcagcacaaggagttttgaaagttttaatacatggcttttgttattcctaaaagtcagctcttgggagaagcattaacaagttgggaatatatactcgcaacgtgagagctctatctgtattatgtggcaaactagctgtatttggatctaataagatcaagaaatgatacaaggaattttcttttccccttcccaaacttttgagtcaccctagtaagtcagagtattaacatgtgctagatcattaagactccttcactcgtcctgactgatagatttttcatatgttcctta

SEQ ID NO: 5274 - DNA, 410 bp, Bos taurus
  Clone ID: 38-LIB34-080-Q1-E1-B6
acccacgcgtcaggaataatggatgaatgatttacattgtttcaaatgaagatacttgaaatcaatgtttttgttatcctatattgttgtttatgaaactccattagcaaaacatttaagcgattgctaacacacaaccgaagtagaaagacattatataattttagaaacatttgcatatggttcttgttagctgaaaacaaattatgttttacatagaaacaaatgcagtattgatggatttacttctttgagaaatactcattgaataacgtatcgtttgaatttttcataacatgtctaggaagaggacactaaaatgtaacattggtatgtgtaacatttttattcagctccctgagatatttactttcctaatgacctccctgaaggcacttttatgggacatc

SEQ ID NO: 5275 - DNA, 295 bp, Bos taurus
  Clone ID: 38-LIB34-085-Q1-E1-B10
agggaaatgtaaaagatccaacaatacaaattacctgaggaaatgtaaaaaaaaaaacaaaaaatgcaggtctggttcccgctgtggatggtggttaccataagagccaagactttaagttcttttctacaatgatggaccctttctaagtgctgtgtgaattaatgagtttaatccttatgacaacactggataagtaagctattctgcccaatttgcaatgcaggagactaaagccgaaggaatagttttcaacgggtcctttggttccaataaacaagaaagcctgggtggg

SEQ ID NO: 5276 - DNA, 189 bp, Bos taurus
  Clone ID: 39-LIB34-002-Q1-E1-B12
cggccgacccaccgtcaggatcataaaagcacaaaggcaatctggggttttcagccaagtgatgatttgcaagactgttgacccatgctgctccggaactggtttgaatgttaaacggtaacaggcaccttaacgatgaagaggacacatgatataggtctttctcactcaatatatcactatctccac

SEQ ID NO: 5277 - DNA, 113 bp, Bos taurus
  Clone ID: 39-LIB34-002-Q1-E1-B4
acgcgtccagaaacgtctccatgactcactccgatgatatccacgatcttgaccccttttaccatctttcaagttaaagtttcaaaatacatcttttagcagaacctagaact

SEQ ID NO: 5278 - DNA, 406 bp, Bos taurus
  Clone ID: 39-LIB34-005-Q1-E1-B4
atgccatagaggttccactgaccatatacttttatctgtttcctagctttgttgttgctgtttagttgttatgcagttcttgggttcaaagtagattatatctattcctaaagttgggtgagggtggtgtagctttcacacaaatgcacttaaatattcataatttttagtcatcacaccctgtgagatacagttgtgaagttgataagataatgaacttgacttcccaagtggaaagtgttactgctaattctagctatcctctgatttgctgtgtggccttacgtgtggttacttttttgtgctttaaaaaaaaattcttaaagtagaattatacatggcaactatccattttacagatagtgacatagatggtagaaaactagtaaatagcttcctctcaaag

SEQ ID NO: 5279 - DNA, 314 bp, Bos taurus
  Clone ID: 39-LIB34-008-Q1-E1-B12
ctcgaaaggctgagctgatccgcgcctgggaaagcgcacgatccctcacctacgacatcatcggccctatgtctgctcagcccaatggctccgcgcacctgccaccatggcactgcggtctcgtctcggggccacctgtttgctgggcttcagtttcctgcacattgtcatctcatctcatggacctaatgggcctggccatggttttggcgatcacattcattgtaagaggcgtgaaaatgggaagactgaagcagctgccagtggcttgcccctgatggtgattatccaaaagtcctgatgtggagcttgca

SEQ ID NO: 5280 - DNA, 202 bp, Bos taurus
  Clone ID: 39-LIB34-009-Q1-E1-B4
gaaagccttggagatatccagtctcttctaagaataatatccaaattcactctttggttaatttactaattctcctttccaaaaaaatccttggcaagttatactttaaaaaaacagtacattaattaaattgaattgggttaagagactcaagtatcaactttaaataattaaatggcaataatagtgaacttcaaccaat

SEQ ID NO: 5281 - DNA, 321 bp, Bos taurus
  Clone ID: 39-LIB34-010-Q1-E2-B4
cttattcatccacaagtggtaccatctttatcgatcacgtgatcatcaagtttatgtcataccctatatctcacgaaagccaacacgatgtaatcggtgtgactttccagcacaagttgttaggacacttgacatttgaagcaccacatggatttccttcataattgtcaattccactgagtgccaagaagtagctcacacgatgattctgggaagtcactgttcatcatttacaatccagtggagtgtgagatgttgcatggtacgaatacaaatttacgtgacctcagctcatggatatagaatccactgtgcacctct

SEQ ID NO: 5282 - DNA, 391 bp, Bos taurus
  Clone ID: 39-LIB34-011-Q1-E1-B4
cggtccgtcattccgggtccgaccagcgtccaaccttcagttctactgtttcaaagcttttagatgatttctgtatcagttttgtataatgacataatgcaatttaccaaggttgtttaacaaaggtaacaattgaatttattaaaccaaaataggaataataatacttctatttttggatgttgacaagctccaaaatagttttcagaaaatagatatagactgtgttcataggggaaagtgtagatttgatagtttaaaatctcattaattttgtctccccatttaaaatacatccagcctgaccttctttggctttggaatttaagatttttactttcttaaaaattgctgcccaaaattaacattttgtgagtttttaaaatgtcat

SEQ ID NO: 5283 - DNA, 429 bp, Bos taurus
  unsure (404): Clone ID: 39-LIB34-021-Q1-E1-B12
tacagattaaaggaattattttgttgcttaatactcctcagacactatgcagtacccattctatcacttgttaaatttatttctaacagagctcaaactttgggttgtcaatgaacctagttaagggcatgatcttcaccctctttgaaaccgtgggtcacctgtgacaccatctggagaatgaaatatactcaggcggggcttcctggatgattctttcaaagacaaatcctcaagtgacttgtttctttggatttttatcctttgccctctactcttcccttttcacccatcaccgctcccccactcccacacctgggaagatgcaatgcctgtggctgaagcagcagttttgcaaacctgagaacaaaagacatgtattgctaagcagactgaaggagtangaaacagatcaggtaatgtccttgc

SEQ ID NO: 5284 - DNA, 423 bp, Bos taurus
  Clone ID: 39-LIB34-027-Q1-E1-B4
gacgaccatccccgccacacgctgttcacggctctccccgcaggacccgtacacctgcccggggacgccggggcggcgccgtccccaagccgatgcccacccgagagcccccccggacccatggctcccgggggaacctgcagacccgtccgcctggccctggccctccgcggctggtgtctagaggcctcaaacccagcgctcccccaactgtgtaccagccccagcccggagcccacaggacaaagcccaagaagattgtatttgaggatgaactcacctcccgggccctcctgggcaccaagaagtctactagagccatctgcgagagacatgtgcctaggccccaccccgtgcctgactatgagcttaagtacccaccagtgagcactgcaaaggatcggagccgctatgctgccgtgt

SEQ ID NO: 5285 - DNA, 402 bp, Bos taurus
  Clone ID: 39-LIB34-031-Q1-E1-B4
gtgatgcctgcgtcattcaggagacacagcctctcacggtgtggatggagtgcagcagcctaggcctgggacgccccagcctccctgcacaaccgaacccatcccccagctcgcaggctcctacacagcgcacacaggcccatctgagccaatgtgttcttgttctggcttgtttagggggaaaaaaaaatgttcagataatcatcacattggaatataatgcaaacccaaaaaaaaaaaagaaaaatccaatcagcacaaagtagagaagcaatctcaacttgtggtcacactctttcgccttgcttcacgcccaagagtatgacattcgttgttcacatcagtatacaactggctctttttgctgttccatggaattcacatcaccattgtgttgccatt

SEQ ID NO: 5286 - DNA, 418 bp, Bos taurus
  Clone ID: 39-LIB34-036-Q1-E1-B4
tagttctagatcgcgagcggccgcccttttttttttttttttttgcttcagtactttattgaaagaaagcaataaataatactgtgataaaaatagttcaaaagtagactgtacatactttgttacatattcaggaagttcacaaaagattaatagaaaaacagaacagtaacaacgaattatacaagtgattaaaggcggacccacatggaaagagacctgccgtctctctaccgagatctcagctgcacaataagtaacgcaccatgatctgaacgcctctcttgctggcttttttaatgtgccgctgaaaaagtaaaagttacatttgctacttatacaatccaaaatggctatgtcatcaaaatctaaaaatgtacgcctaagtccattctttaaacatgtttacaaacagatg

SEQ ID NO: 5287 - DNA, 389 bp, Bos taurus
  Clone ID: 39-LIB34-037-Q1-E1-B5
gcccatcttgctcctttagtcatggttgggaccccttcacggacagcagcaccaccttgtggaatacatggaacgccgattagctgccttagaggaacgtgctggcccagtgccaggaccagagtagtcggcatgctgctgagctgcgggacttcaagaacaagatgctgccgctgttggaggtggcctagaaggaacgggaggcgctcagaactgaagctgacacgatctccgggagagtagaacgtctggagctggaggtggactagcctaagacgcagaagtccggccctgccatgtgtagaggttgacgacaaggttaccggaggcccttggatcataggcacggggataagaagtgggacgtacgatatgataacagactgtgg

SEQ ID NO: 5288 - DNA, 386 bp, Bos taurus
  Clone ID: 39-LIB34-040-Q1-E1-B4
gacccacgggtccggttttccctccagacgagatcgagcaggtttccaacaaggatgacatgaagacttctctgaggaaggtggtgaaggagacctcctatgagatgatgatgcagtgtgtgtcgcgcatgctgggccaccccctgcatgtcatctcaatgcgctgtatggtccagtttgtacgacgggaggccaagtacagcggcgtgttgagctccattgggaagattttcaaagaagagggcctgctgggattcttcgtcggcttaatccctcacctcctgggcgatgtggttttcttgtggggctgtaacctgctggcccacttcatcaatgcctacctggtggatgacagcgttagtgacaccccaagggggctggggaac

SEQ ID NO: 5289 - DNA, 437 bp, Bos taurus
  Clone ID: 39-LIB34-041-Q1-E1-B4
ggccaaccaagccttcggaccaattctctccctagggggagggcccaggctcacatctttccaattgtgtcatccaaactgctgggaaggaggggtgggcatcctctttggtgatatgatgttctccgtaatcctggggaccagttctcccacccccgtaattgccaaggacctggacttcaggaaggatgctcaggaggccccacccacacgggcagtgctttgggggccccaagagagctggctgaagactgggcattgtcacacctgctggatcagccctgggatctggcctggcctgagatcttagggatttgagtaagggaggtgggataggggccagggttcccaagaggcagggattcagacctctgcccttggctggaggaagcctgtgggtaccgtggctgggcgagaaggggctgtcaagatcccca

SEQ ID NO: 5290 - DNA, 263 bp, Bos taurus
  Clone ID: 39-LIB34-045-Q1-E1-B4
gggtcggtcacgcatccgctggaatgatgtctcaaactcgttttccttttctagtcacgccctttcagctaacggctccggatggggattggtgacccagaaagggccaataaaaactctgaagtgtttacaagaacatgagtaggtaaatgtctctgaacaccgtgtagtgcacatacctgtccccctttcaggataaacatcacatttcggacactcaatgactgggttctgcctgtaaggggatctgtcggcaacttgcc

SEQ ID NO: 5291 - DNA, 349 bp, Bos taurus
  Clone ID: 39-LIB34-047-Q1-E1-B4
ccacgcgtccggacaccaaggtgctgattcatcgtcgctgccgggcggtccagccgccgccctagtggataaggggatcccgagtctgctgtgttgtagagtggtgcgagttttgctgcccggcgtctcttccgagtgttgtgcgtttcagatctgcctggtaaacctggtgtaccatcatgctggccgcaagacttgtgtgtctccgagcactgccttctaaggttttccacccaactttcaccatggcctcccccgttgtgaataattccatcacacataatcaatggctttcaacacccatcagggaatatgctaccatcacacgaattgggattcgacgtggaaa

SEQ ID NO: 5292 - DNA, 167 bp, Bos taurus
  Clone ID: 39-LIB34-051-Q1-E1-B12
aagctgctgaattttaaagagagttttttggggccaccaaatattttggatcatgcagagaatatatattgtactgtagtaattttgtatttacatttgtatgatgtgacataatagatgtgaatgttaatcactgcttgactatgttaataaagttgtttaactat

SEQ ID NO: 5293 - DNA, 240 bp, Bos taurus
  Clone ID: 39-LIB34-052-Q1-E1-B4
gtgactgcggatccatccccacctcccgctctcacagggcccccggccaagctaactgtcaggtacgtctattcggcattggagacacaggcttctcagaggcagaggccaccctccaaccagaacagacatgagggcagagagactgtcccccctcctggctctggggctcctggtggctgggatccgcagtgtccactgcctcccagagaatgtggtggtgaaggaccagcgcagaag

SEQ ID NO: 5294 - DNA, 316 bp, Bos taurus
  Clone ID: 39-LIB34-060-Q1-E1-B12
cttcaactgtgggcctgaaaacctatttcttgtaaatgacacatgctagattggttttaggatgtaggttttgtggtgggtgggtagcaggggctaattgttgcattctcacaaataggatttacttttgccagcaaaaattcagggtttcaaatcattgtagtttttccactttaaagtttgggtaatgctattcatcacagggcttgtctgcatactcatcagcagaacaccaccaatgagttgtcatgtcagacaaaactgtcagccaggaagtgttccttccagaagaccattggtgagggtctgcctgcaa

SEQ ID NO: 5295 - DNA, 197 bp, Bos taurus
  Clone ID: 39-LIB34-068-Q1-E1-B12
gattaaggggtgtttgggattgcattaaaggtctttttccagaaaaggtcaggatttttagcacagccctgggaaagatgtctggaaggtgcctccctggtctggcttctcatctgatactgggttctgtatgacaagggaacagaccccacgctttctccccttccccattccaggtgacccgcagagccctgttt

SEQ ID NO: 5296 - DNA, 268 bp, Bos taurus
  Clone ID: 39-LIB34-072-Q1-E1-B12
acccacacgtccgagcatgccaagtgcaaactgtataagctagattttctaggggctgtgttctggggatgagggtagtggggattgtatggggtttttggtttgttttgtttcaagataataagcaagctgaaaaaataaaggaaccctaataaaaagggttaagttttggggggttaaggaaaaaacctttcccaagattaatgagattaagacaacttgggtaagttaatccaagtctgaatctccgggccaaaaattccttttg

SEQ ID NO: 5297 - DNA, 432 bp, Bos taurus
  Clone ID: 39-LIB34-075-Q1-E1-B4
ggaatgtccgaagaatgatctggatgaagcaggccttgaaaaaaatgagccaccctatagcacaagccctcaaatttccataaatgaattcccctgccactgccgttacaacatcctggttaaccccacaaccttgaactgtgggcacagcttcggccggcactgcctagctctgtggtgggcctcttcgaagaaaacagagtgtccagaatgcacagaaaaatgggaatgtttccccaaagtcaatattctcctcaaggacgccgttgaaaaattatttcctgatgccattagaatgcgatttgaagacattcagcagagtaacgacatagtccagagtcatgcatcctttcagaagtttgggaatgatcacacgccttcagctccccacacaggccgagggaatcagcataggggatggggtttctactc

SEQ ID NO: 5298 - DNA, 318 bp, Bos taurus
  Clone ID: 39-LIB34-076-Q1-E1-B4
cttttgcccttgcaacagaccaatgaagcaaactcggacgttcatagcataaaagtatcatctgttactatagtacctatcaggtggttcacttcagtcgtttacctttggcagtgagtttcatatccagcagcactgctaatacatgactaattgtcagcctgtaaaaggacttgctccattacttggagaattgagacaagttgtggaagtctctgaatctggagtcttcctcatcatatcagacacaatatcaatccagcaatctttaggccacagtgacacttgtatccatgtactccaagaccccctttttca

SEQ ID NO: 5299 - DNA, 357 bp, Bos taurus
  Clone ID: 39-LIB34-077-Q1-E1-B12
cctagagtatgtcgtattactgtcaccctggctactttgtcatccagccatggcaggagatacacaagctggaagttctgatggaagagatgattctgtattacagtgtgtctgaggagcgccatgtggcagtggagaaagaccaagtgtatgctgccaaagtggaaaataagtggcacagggtgcttttaaaaggaatcctgaccaatggcctggtgtccgtgtacgagctggactatggcaagcatgaattagtcaacatgagaaaagtgcagcccctggcggacatgttccgcaagctgccgttccaagcggtcactgctcagttagcaggagtgaagtgtaaccagtggtctg

SEQ ID NO: 5300 - DNA, 333 bp, Bos taurus
  unsure (157)...(159),(161),(163)...(164),(170): unsure at all n locations; Clone ID: 39-LIB34-080-Q1-E1-B12
agatagatcatgcatgtgattgtaaatttgtataatgttgttacagtagagaaacacacatgccttaaaattgaaaaagcagggcccaaagcttattagttcaattagggtatgtttcaagtttttattcatttctgaacggagctataagaaatgnnnananncttganacataccctaaatgaactaataaagttatttacctgatttgtcaatattaaagcaggagcgtctcactacggtaagatgactttacatcaggaaggtcaaaatcaagagcgagagtccgcttaagttgataagagatctcaggactggaacttgaatgcgact

SEQ ID NO: 5301 - DNA, 96 bp, Bos taurus
  Clone ID: 40-LIB34-003-Q1-E1-B8
gaaaatacagtttctgtgttttcaatcaaaatgaactttgaatgttaattcaattataaatgggccaggtcagtaataaagagacagtaacttctt

SEQ ID NO: 5302 - DNA, 400 bp, Bos taurus
  Clone ID: 40-LIB34-005-Q1-E1-B8
gacatccccgggcttgggcagcgtcagctgtccccctgcagtcaccactgggcatcctgtccagccacacatcagggggcctcaccgtggacagacggggagaaacgtatatcagtcccagtcttcaggtgagccatgtgctgtcaactgatgatatgcggaatggtggtatgtccacaacagcgtcttgtcatttgggcctaagaccaagctgctgcttaccagataggaatacatcattcctgagtacagcacattgtatttaaagcaatttcctgcacacttttcactttaccctcaagacagttatgtgaatgatgcatggcattaccttccacttcacagatgatactcctgatgtacatgacacggtttttttctgtctgaagcaggcgcaagt

SEQ ID NO: 5303 - DNA, 82 bp, Bos taurus
  Clone ID: 40-LIB34-009-Q1-E1-B8
accacacgtccgattattttctgggatttccctttctgctccgaacaaatttcccacagttctcaattgtcaatccccggtc

SEQ ID NO: 5304 - DNA, 241 bp, Bos taurus
  Clone ID: 40-LIB34-012-Q1-E1-B12
atccggtcagagtcaatggtcatcgcaggcgcaaggactgtaccttcggtcccctggagcaccctttaatgtgctgagtgctctcaaagacagatcttgagaagatgtgaatcgcaatatccagctggatgaacgtcatacagtcaaagaatacaagctggtattgtccaaccacgctaatctcacgaactgtcagcatcgatatgatgaacaggtagcaggtgacgatactcactgtcca

SEQ ID NO: 5305 - DNA, 432 bp, Bos taurus
  unsure (373): Clone ID: 40-LIB34-014-Q1-E1-B12
acctcaagcttcatacacacagatgaagagaagcaaggacacccccgacattcccaggggcggggcaggcccggctcttggagcaccagcgcttcaaagctctcatttccgtgggattttttggggggggggggggctgtaactactttttgggagaatttcacacctagagtgaaggatcgacctcagctaactgcgctgtttctcagcctctggcttcggtgggcttcctcactttgggaggagacgcagggccttggtgtcagctttcatctgggctcagggctgatgccttcccaccgttaggagcacaaagcatcctgtccgcctggcacccccaggttcatggtcgctctggtcccagtctgcctcnctacctctgccatctccaggagcccccccttgagcatctcgcacctagcctgggaccac

SEQ ID NO: 5306 - DNA, 377 bp, Bos taurus
  Clone ID: 40-LIB34-015-Q1-E1-B8
tatataaagggttttggccaaattggttgagacgtggtccttggaatattattttctttgtgacctatgagcagctgaagaaactggatttgtgacaatcaagcctgcatgagacatcctctgaaaacgctcacttctgaaatagcgaagcctcctgtctttcccactgcttctcactgcttggcctgccacagattaaagtgtgagcgagcaacaggtgagggctgggttagcttggatcgctgtgccccggcatcggatactctgcaccaaatgttaacggcctcgactgtaacatctagacactagtccttaccattcaagtgcccttcgacatcaaagataacaggaagtgcatgtttcttgctaaagaaaac

SEQ ID NO: 5307 - DNA, 408 bp, Bos taurus
  Clone ID: 40-LIB34-016-Q1-E1-B12
ggcttttaagggtaactataagtgcttgaaaagcagttgattatccctttgaaattattaacccaggaaaggtttttttaaagctcttcctcatttaagcttggtcacatttgtcagccattatttaggtaagataaaagattgctatttcatattagttgctttgacccaacaggttagagttcttggtttttaatcaaattgatctgaaagctttgtcttccctatttgtgtcaacctctctaccttctccctctaaaatggtgttttagtaagttttataaaaattagaattattcagagataatttataattagagctttgtcacacttttcagaacacaccctgtaatttatggatttgatagcatttaattatatataaccaaaattggtgagaaaaatgtc

SEQ ID NO: 5308 - DNA, 83 bp, Bos taurus
  Clone ID: 40-LIB34-018-Q1-E1-B8
gcgtcaagccgctcggttctctgcgtgccacccctgcagcccctagcgcagtgtgccaatggtccgcctgtgtaccagccccg

SEQ ID NO: 5309 - DNA, 343 bp, Bos taurus
  Clone ID: 40-LIB34-020-Q1-E2-B8
acctgtctttttgctggaagtttagtaaaactgaaaagaagaaaaagagagagtagtagtatttttgtttgtttttctagcggttggcctggaatccttggaatggttcacggaagtaaccagccattgattagtatagactcctctcctactccactggattcttgtccattcctcagtttatcaagccagagatcaaagacttactcccatcaatatgccacatgattcagaaataagttttaaaataatcgattcttgaaatagagactattcacaattaaacaaatggtagttactacgagctgcatgtttgttcgagtgggtggattgggtaatgcac

SEQ ID NO: 5310 - DNA, 410 bp, Bos taurus
  Clone ID: 40-LIB34-025-Q1-E1-B8
gactcctccagcttgatggattcagaggagtaagatttcctggtcttttatcaccagtttatctctggaactttttttataaaggccacacattgttcagctgacttctttagtcatcccaaatactttcagaactcttgggtagacgcattataactccagaaatgtagctacatattttctgataatcttgattagaacatctggagaattaaccagtttatccattataggaacaatttggaatgagaatttttatttcttacaaaaaagtttgtctattctttctgccgctagtatactttttgggcctcttacgagaggtcttacagggtctagtattggtgatgaggtttcctttctgtgaatatgttatgtatttcaaatacttgggacaaggcccggcacac

SEQ ID NO: 5311 - DNA, 421 bp, Bos taurus
  Clone ID: 40-LIB34-032-Q1-E1-B12
gataaaccgcagccctcggtggggagaagatccttgtccacgggcccactggcctcggcccagccccggcctcccaagaacacagcgccctctggagcctgctgggaggatcgccgcctggaacgccgcccgtctttacctggaccccgcttcaccattccaggagcaagaaaaacacccatgagccaagagccctcttaaggctgctaactccagggggacagatgaggggacgtctttgaagaaagctgtttttgatttttaaaagcccaacttttttttttttaattatcgtaactaaagttttcagactggagatgctctctttcacacctcgtcacagctgggatgttgtgctggtcttttttttttttaattctacaagtacaacttttctagtgctagcccccagtggtgctag

SEQ ID NO: 5312 - DNA, 77 bp, Bos taurus
  Clone ID: 40-LIB34-034-Q1-E1-B12
cacgcgtctgcagctatcaggatgcgtgttatggcttcctgggctcgtttttgtatcagtactcaagactgcatcct

SEQ ID NO: 5313 - DNA, 429 bp, Bos taurus
  Clone ID: 40-LIB34-035-Q1-E1-B8
aaagatgctgcagtctcttgcacaacgcccagctccagcaaacaccaatcgggagcggcggcctcgttaccagcacccaaagggagcgcctaatgcggatctaatctttaagagtggtgggaggagacgttgatccagcagcacgtgtcatttcattaggtcctgtatctgatgttgtggatagtggagtcctccagcaattgaatgagagcagtggacacatctcagcatgtcggtctagagagttgcgaatctaaacctgggacaggctggggccatgaggcagaaacagcagcctctgccaacaccggaacaagccgacgcttccagacaaggcggaaaaggccttttgtaatggaaatcacgtgagggttcatcttctcttgagaatggcagtcaagaaatgaggtggttgacttgactcctgag

SEQ ID NO: 5314 - DNA, 404 bp, Bos taurus
  Clone ID: 40-LIB34-036-Q1-E1-B12
actcaggtatgcagtgatccgattcaaccagtatttcaaggtgaagcctcaagtggcggccctggagatgccaaagtgaccacccttcccagtcctcccccgtctgcctggccagacctgctctccagggcccggctctgctctggggtctgcaccttggacaaggtgggcaaggggccggggggtgtccctgaagagcgctctgcccctgtccccagccctgagagatgcttctggtgaccgattttgtttggatgggctggtataacccatccctgagggtcctctccacctcgccagacttggtaatggggagtgcctgaagccacgcagggcttggactgcagccaccctgggaggcccagtcgtcccaccccgggcatcctgagtctgggctcagacct

SEQ ID NO: 5315 - DNA, 366 bp, Bos taurus
  Clone ID: 40-LIB34-042-Q1-E1-B12
gggtcgacgcacgcctctagtctgaatcataagtgttttttactgtctagttctgatttgatgaataattattaaaatattaagaaatatcaacagtttactgacttacttgtttttgacatactgagcaccatagatagtagtgtgatcttattaatggtcaacattaatttagtcaaacatctctgtattattttttaaattctttgtaaatatttgtaggccttgtaagtaattgaatattgaaattttacaataattaaactagcttaacagcaatgagaaatcatgaaaatattttagcatgatattttcattattgttttctttaaattgcctttttagaagcaggtttatgtatgtatt

SEQ ID NO: 5316 - DNA, 423 bp, Bos taurus
  Clone ID: 40-LIB34-048-Q1-E1-B12
gttttaagtaagcagcatatcatggatattgagtttttgtttttaatccatatcgataatcttttaattgatggatatatttacatttattatgataacttagataattattattcccacatattttgttattttctatttgctatgttattttcctctgctttgtttgtgttttcttgacttccatattttaatcaagttttcccagtttctctactttttcttgttggaaaacaatacaatacgttgctgtttttctcctggccactttgccatcccttaacatccagccccactggctctcttgccaatcttcaagtatcccaagcttcctccagcctcaaggccttctcacttcctgtacttaatgcactgctttcctatgtaattcatttttaacaagtatcaggctttatgtgtccc

SEQ ID NO: 5317 - DNA, 425 bp, Bos taurus
  Clone ID: 40-LIB34-048-Q1-E1-B8
aagggtgagtgataaggcaggtttgaggtttactggtactgttgaaaatttcaagtattggctatttaaatacttagccctaaggttgatgaaaaaagcctgagaggtgtctgtgtgttaatgaattggagagaaagctgcttgtttgctttgttgattgcctcaggatatctctttaaaataagctgttttaagaggagcagaagggaaatctactacctagtctatacagtaagaacctcaaagcttctgatagccctaagtatgggggagagtgagcgagaagagtggttaggatggtccttgactgctctggaatagggaaagaatccgctgaccttggtcaagcacgtttttatctgcattgttaacctgcctttctcacccaggaaatcaacccctgtgtttgtttccctcttggttaa

SEQ ID NO: 5318 - DNA, 207 bp, Bos taurus
  Clone ID: 40-LIB34-056-Q1-E1-B12
ggtcaacccaaacgtccgccgcggccgggatagcgggcgagacgttcctggcgggatggtcccccggtgccaggtggaagtgttgtattttgcaaacagcgctgacatagcaggaattcgctctgagactatttctgtgccgcaagaggtacatgcattgcagctgtggaatgagatagaagcacgccatcaaggattggctgaggt

SEQ ID NO: 5319 - DNA, 159 bp, Bos taurus
  Clone ID: 40-LIB34-059-Q1-E1-B12
ctaggtctagattgcgagcatcccaactctttctgttatttctaacgttttcacgatgggttctgctgtgttcatactatcctcatttccccagggtgctaagcttcatggaatgaaaacagtcggggactagaatctaacgttgggaaaacttttctg

SEQ ID NO: 5320 - DNA, 187 bp, Bos taurus
  Clone ID: 40-LIB34-062-Q1-E1-B8
ccattggctagttgagaacaatatcagcggctgcccacacccactcatcccctctgaccacttctcactttttgcacaactggagctcttactgcctttcctgccccaggttaatggcattcaccttcctggcaggaggtagtcaagtaccttcagaggatgacctcagttttactcgtaaacttgt

SEQ ID NO: 5321 - DNA, 189 bp, Bos taurus
  Clone ID: 40-LIB34-065-Q1-E1-B8
ggtccaagcatccgtccggtgaatcatcaggttcgcactgacaatacgtggcaaagcatcaggtacacacagattccgcctgaagtccctcgccttctcaatggcaaagtgaccaccattcacgatcttcactgattcgctctccttgtttcctccatgcaacatctcatcctcacagggtatatcttc

SEQ ID NO: 5322 - DNA, 216 bp, Bos taurus
  Clone ID: 40-LIB34-068-Q1-E1-B8
ggtctcaataaaactgataggaagatatcagagttttgattgattgactcaagtttaattactgatcatttgggttggatttaagagttatatagcaaatgacaggggtttcatgaatcaaaaaatccacaaaaagtcccacattttagcccaatgaaccctctccccctctcaaatcaaaacaaaacaatcaaccctacactcaaatacaaaccc

SEQ ID NO: 5323 - DNA, 212 bp, Bos taurus
  Clone ID: 40-LIB34-069-Q1-E1-B8
cacagctcggcccagaaccgctccgggtcgtcgatgacaagctcccggcggcgccccgagcccgcctctcgggccgccaccttcccgcggagagcgcgcctcgggggacacctgtccccgggcagggggctttggccactgctcggcgccgccccgcgctcgcggtggagccccagcgccgctgggcgaggaggacggcagggcgcctccct

SEQ ID NO: 5324 - DNA, 187 bp, Bos taurus
  Clone ID: 40-LIB34-070-Q1-E1-B8
gaaatgttgagacagcttagggcagaagcatctattcgtgtgatcccaatgctaaaagccatgtgaccagagtcagttttgccccctctcttaataagtctatctctatttttttccccattatcttgcaggtatgggagtttactctaaataggaatgaatcttcccattacaccttcttcaatcc

SEQ ID NO: 5325 - DNA, 364 bp, Bos taurus
  Clone ID: 40-LIB34-077-Q1-E1-B8
tcgtagaaaaatctctaaaaacacagaagtgacagtcctgcacccttttaacaatctcttccatagcatgaacttttatcagcagtcagcaatccaatgtattccaatcctcgacagttatggcctctgatgatacgatctttttacaataaaactgtgagtacaacattttttaaaaatcagataaatagtagcctgcaagagcaatcctaaacaatcaccattaaaccacactatgtaagactttattgttaaacatttacctcgctaaattatcacgtttcttggaggagcacattatagggtgtgattggtgattcttcaatctgtcagacactagagcattcatggtggataaattgtc

SEQ ID NO: 5326 - DNA, 285 bp, Bos taurus
  Clone ID: 40-LIB34-079-Q1-E1-B8
agaccacgccagtgtccatgccacacctgctctaatgcaacccatgcacacccacctgcactgctctcaaaacccagtccagtttgggattgccaaacttggtcgagggctccttgtgactccttgtcagaaatcgtcacgcattcagtctgttgtgtttcagaggggatcagattatcacggtcaatcccacactctcgacattgcacaggtctcacggccactggacgtccttcagagtcacatcctctcttcgagcgactgcgcagaatttgtgccttaaac

SEQ ID NO: 5327 - DNA, 163 bp, Bos taurus
  Clone ID: 40-LIB34-080-Q1-E1-B8
ccacgcgtccaagaagtggttctactgcgaaggaactccgcaagcagttgggccccaacaaccaagaattaacccccaacccctggcccttgctcccctgaagtcctgttccccggcttgggggcaaacaaaaccaacccaacacggatttgggggaacatcc

SEQ ID NO: 5328 - DNA, 391 bp, Bos taurus
  Clone ID: 40-LIB34-083-Q1-E1-B12
agcggacgcgtgggcttcgcagagctctgggcccccctggtgtgctcttcccagcctgctcccacctacttttctcacgtccttcccaacctttcctcccttgtctgtgtccctcacgccacctcctgcattgcctcccttcctgttctgtttggttgcacatcctgttttacttctgcctgctctcttctccgaccttctctgctttgaggctctcttctctttttatcctgtgtgtttccgcctctgcctcctttcctgaccccttgggagctctgagccttcttccttctcagccccaccaaccccccatcccacctccaaaggtgctgagctccacatcacacacccccttttgcagctgttcataccctgggcctctggaagggcc

SEQ ID NO: 5329 - DNA, 308 bp, Bos taurus
  Clone ID: 40-LIB34-085-Q1-E1-B8
aggatggtgatcagacccacacgagggactctgtcctgcagcctggactggccagccccgggcgaggagcagtgggaacccaggcctgccgcccagctgagggggctctgctcacggccgtccgcatggtgctgctgctcttggagtggacatggcgagatggccctctcccctctgggcctgactgagggctcaggacgcaggcccatagccactctgggggcccacacaggcagccacgtgacagcaatacagtatttaagtgcctgtgtagacaaccaaagaataaatgattcgtggtttttttt

SEQ ID NO: 5330 - DNA, 276 bp, Bos taurus
  Clone ID: 41-LIB34-001-Q1-E1-C2
acaagcaacaaattcctaagtgtgtgatcttgcagggaaatgttttgcttatttgtttaacaaagtattgagaattggatttagacagtccacatcagagaaacccaaatttggggtttaaaatagaattaaaaaacttcaaaatccaagaaacaatggcaaaaattggccaaattaaaaaaacccctccggtcattcacgcatttcccaaaacccccaccattcaattccaaggccaggatctaaattttcaaaaaaaatttcgaacctaaaacc

SEQ ID NO: 5331 - DNA, 408 bp, Bos taurus
  Clone ID: 41-LIB34-018-Q1-E1-C2
aatgagttgtaagctgtcccacattggaaatgggaatattgcattctgggaagtgtttacactaacaagattatccagaatacagagttactggtcccccccccacaagtgaaccctacaaaaagacactgttgaatcaacatcagactggcacattcacgagttaccgtcaaatatcctcaggtgttagtttcacacaatacttctgcctgcctctctcatgtcttctccctcgtccagttcccatccatgcagctccatagcatagctctacgtaattacttctacatcattcgagtaaattcatcagatcatgtcacactataatgattaggcttctgacgaccttataaagccggcagtattgatcaaaccgttgaaatcagaatagacatcattattttcgtc

SEQ ID NO: 5332 - DNA, 428 bp, Bos taurus
  Clone ID: 41-LIB34-021-Q1-E1-C10
atcaagactaaacggcataacaaagaagtactaatatgaagatgattcctcgtatcaggaatgattaagtatttggtacagtaagttccctatgtaaaaacaagttccgttctgagagccaagttcgtcagtcaaatttgtttataagtccaacaaagttagttcatctacccaaccagcacaattggctaaatagtactgttctgtaatagatttataagtcttttcacgcaaataatatgtaaacacaaaaaataaacatctttactcgtacagtacagtaccttgaaaagtacagtagtatagtatagcagatggcacatgggctgtcatcgagtgaacaggcgaggagagttactaactcaaggaggtgggagatggaggagcttcagaccatcagcaataggggataccagctgcatcaccac

SEQ ID NO: 5333 - DNA, 251 bp, Bos taurus
  Clone ID: 41-LIB34-023-Q1-E1-C10
gggtccaggcaagcgtccgtagtgagacataatactattatttttctgttgaccgatcacgatacaatggtattgtgagtaatcacagtagtgaaagatgtttatcaatattcataatcaatagccagacgaaggataaaagacaattacaattgcaagccataagggcaacattgttaacctaacaatagaagataacgacatacgatttggggggtcaaccagagtgatgtggtaagtgaaaatgcata

SEQ ID NO: 5334 - DNA, 447 bp, Bos taurus
  Clone ID: 41-LIB34-024-Q1-E1-C2
tgggactcatgggtcgacgcaagcctctaaattgagtcatattaattcaagaaaagacaagtgatagactataaagttctggtgaaaaagagaagtcacaaaactaatcagtgactctaaatgacaattagtagattaagtgtatatatgtaaaattctaatcacttgtgattcttagttaacattttataagctttgtagtttacaagggcctcttttttatttatccaaaattattctttttgtccccttctctcagtctctttcaaaaatacacaactgtgctgcaacttggaaaataatctaaatgtttaagaaggttttagtaatgtcaaatttccaaaagcactatgtgaccgtaacatacgtacgttttaaagagggattacaattacatttaaatggattcataaaatcgctatgtgaagtatagtatttgcttttgca

SEQ ID NO: 5335 - DNA, 379 bp, Bos taurus
  Clone ID: 41-LIB34-025-Q1-E1-C10
agtgggattggcttcatatcgtgggctcgtccgctgttacccacctaccagagcccttccccgcggggcgggacctcgtaacggccaactcctttccagctgaagaaacacgtaagttctggaaatagcgacccagtatcatggctggcagccctaatgaagattcagaaggaagccgaattacttacgtgaaaggagacctatttgcatgtccccaaacagactctttagtgcattgtatcagtgaagactgtcgaatgggcgctgggaaagctgtcctcttcaagaacaaatttggaggagtgcaggaactgttgaatcaacagaaaaagtctggagaagtggctgttctgaagacagatgggcgatatatatatta

SEQ ID NO: 5336 - DNA, 375 bp, Bos taurus
  Clone ID: 41-LIB34-033-Q1-E1-C10
ctcgcgggtccacacaagcctctaaattgagtcgtaatcacttttaagaattatttcacagtattctccaggattaatgccaagtttagtggttggtgagtcttggaacccaacttcacatgtttcataagttaaataggtaatccttagctgacacctcaaggatgattgacagtcagtggtaagttgttaggtcctatgcatgtagataactagaatattgggtaactggatgctctcaaaatatctgctcgttatcttcaccagtgttgtaagaaagtaagtcacttagcacgaaaaagcagatactagctgcatttgacagttatccagtggttcttttcgctgctcgaaatttaggttgttcccctgtta

SEQ ID NO: 5337 - DNA, 432 bp, Bos taurus
  unsure (404),(415): unsure at all n locations; Clone ID: 41-LIB34-035-Q1-E1-C2
gatctagatcacgagcggccgcccgcgatctagaactagttcagaacagcaaaggggatgttctgagatgattcatgtagatggtagtatctgaatcatctcagaacagcaaaggggatgttatcatactaccatctacatgaatttttttcttaagaaatcaatttattgccctaactattataatggagaaccagaaggcaagaagtttgtaataatgataaaatgaaaatcaatatgtaaatgctccagcatgaccacgctatacgacatcatgaaatagatattaacttttactgataatgaataggtttggatttaagggtcgattggaggctacttctataaagaagtactggaaagattagaagtataagtgacaccagaatgagaaccagtattanggtaagttaanacagaccatataccttt

SEQ ID NO: 5338 - DNA, 414 bp, Bos taurus
  Clone ID: 41-LIB34-038-Q1-E1-C2
cagacgcgtgggctaaaaaggtgaagaggctgtggatatctgatggtgcaatcagcagcaggcgaatgaagccctttgaggtaacagataagacttggtacacactattggccagtatgtgctacactatgaagatgtaactactcattgttgcctagacataagcctgtacaacattttgaggtaaaaacatagtcttttttcaaaaatcctgttgtagtgtgtttgtgagtgttgttcactagtcacacattagctgtagagtgagtgcatgacgccccgtgaccccaggaagctcgccagtaggaaaagcagacgccactgttctctcgttagcagccctctcgagtgttgcctctggatcctgtgcatttcggtatgcattgtgtttctactgatctctcttaggttttt

SEQ ID NO: 5339 - DNA, 257 bp, Bos taurus
  Clone ID: 41-LIB34-041-Q1-E1-C2
aaaatatatgccgtatctttccaaatttctcctgagaaatgtttctaatattcctgtttatacatttaaatgcctccttgatcatacttattcactgcacataagatgcacacaaggcttcttgtcacaccacgctaagtgtcacagactgtgtatcatacattgtgtaccctacgtacaccctgcatcatctcgatatgactgtctgcaacgtgctcctgtccaggatacctaccatcaggactacactctcacac

SEQ ID NO: 5340 - DNA, 230 bp, Bos taurus
  Clone ID: 41-LIB34-044-Q1-E1-C2
acaagaaatgaaaggacgattcttatttccactgcggttacttttgtggatgtgtctgcacctgcagaggcaggcttcagagctcggccaaccatcaacgccaggctgccctttaatttcttcttcccatttgtttgatagtgctcatatgaaaggatgtactgatccctcaatatacatgtgaaaagtgaaaactgtacatttgatgagattaaattttatatatggct

SEQ ID NO: 5341 - DNA, 64 bp, Bos taurus
  Clone ID: 41-LIB34-045-Q1-E1-C2
actagttctagatcgcgagcggccgccctttttttttttttttagaatgattaagaagacttta

SEQ ID NO: 5342 - DNA, 398 bp, Bos taurus
  Clone ID: 41-LIB34-049-Q1-E1-C2
atagtggagcgcctgtctcaccgtcctgccaaggccaggatatgctatggacagctggcactaggggtgacccagctgttgctcggggctatcagctgtgctcttggtgggcttctctacttgggaccctggattcagctgcgtgcctcgggctgtgccttgtgggcagggtttgtggccattgcagcacgagttggggccattgtccacgagaagcgccggggcaaactctccggctgcgtatcaggtctgctcaccctggctggcattgccacggccgtggccgctgtcgtcttctgtgtgaatagcttcatctggcaatatgatggcttctatgacatcagctctgtgtgtgattccttagtccctgtcacccccacttcttggtaccaacgaag

SEQ ID NO: 5343 - DNA, 246 bp, Bos taurus
  Clone ID: 41-LIB34-051-Q1-E1-C10
cacaagaattacttgaagattgaaatatggtgtagtgctgaactttaaaactcaaaggctgcagggatgagaggatgagagtagtgatgtttctgtgtagcttggttttcactattgtcttctgccgagccaagaatccttagacatctgttgttgccataatgacaaccacaagcagcgtgtgttgggtgcctgctatgagccaagctctgtgctgagccctttgtatgagcatcacaagctggg

SEQ ID NO: 5344 - DNA, 353 bp, Bos taurus
  Clone ID: 41-LIB34-055-Q1-E1-C2
agcggacgcgtgggatttgatttgctaaacaatgactcacaaataaaaattttacataccaatgcttaaatttaaaaaaaagttttttttaatgcttaggaatatttttgaaagctattgtgtgccagcatcccggaactgcattttattttattgaactatcccaaggcaaggaatcatgagttaatattacaagcccaaccttcaattcaggagagaaccttgctctttctgcaggactatagcgttaaaggatttactgagtatgagtatggacctgagtatgacaactttccatcaggcattgtggtctgggtctgaatcctacatctagtactatcttggaccctttc

SEQ ID NO: 5345 - DNA, 374 bp, Bos taurus
  Clone ID: 41-LIB34-056-Q1-E1-C2
acggacgcgtgggccctggtctatatctaaatgtcagtcagtcaacaaagagaggaaaagcccttttccttggagcttttcaagctgaacaagtacagctggttggatgagggttctgtcatcataacagaaatgcactaaatggctttcaaagacctttccaaacctagggattctaaaaccctagaggaagccagaagttgggataacactgggcgaacaaattcattagatactcagcttcttttacttggaagccacatgttgtctttgggcaacaactgtcaagactagaaatgtagaagtactcaatatttattgtcatagggtctattttcctcccatatcagagaaaggacttggagagtaaatgg

SEQ ID NO: 5346 - DNA, 317 bp, Bos taurus
  Clone ID: 41-LIB34-060-Q1-E1-C10
ggtggtcaacgaaagcgcttcaatgcctgggggaaggagaagagtcgggtccatgaacattgcaggtttctggattttagctcagtttgtcctcttacttgtggccaatgtcaagtcttcagcagactctgagctgtgtggacctcgtggagcccgaggacctccgggactcagtggtcttccagggccacctggttatacaggacccataggtatgccaggactaacagggagacctgggcttcctggactggttgagaagtgcccacccctgcctcagtctgccttttccgtcaagctgagtgggcctttcccag

SEQ ID NO: 5347 - DNA, 239 bp, Bos taurus
  Clone ID: 41-LIB34-060-Q1-E1-C2
agttgttttagttttttctttttaaacccttaataacttagagttcacttttgcttatgacacaaggtagggaaccatcttctttctcatatgggagccagcacttccccactgagctgaaataatcattttgcccttgataaaattcctgtaagtagtggagtctactctggctttctatttttattttagtgtctcttcaccatggaaagttatggattttagtgtgtctagatttc

SEQ ID NO: 5348 - DNA, 213 bp, Bos taurus
  Clone ID: 41-LIB34-066-Q1-E1-C2
ggcgcagatcaccagtgacactggatgcaccagattttgaatgggttgtcagaacgtcattcatgtcaacatgctcggggcttgctctagctcacaggctactcctgtgcgataggacagaaatgcagcgccacagctactagtgtaagcagactccaacctggaggatgaaggatcagaacccgaagatgaacacgaagagtgcaatgacag

SEQ ID NO: 5349 - DNA, 83 bp, Bos taurus
  Clone ID: 41-LIB34-068-Q1-E1-C2
aaccaaacgtccgaaaagaaagccaatgaagggttgggaaacattccttaaaggcccctcaacggaataaccgggtaacggaa

SEQ ID NO: 5350 - DNA, 236 bp, Bos taurus
  Clone ID: 41-LIB34-072-Q1-E1-C10
agatgaattcattggagcagtagcagtggttttgacattccgtgtaatgtacgttgactacccgtatatggcacttaaactcatttgtcttgatgattctgaacttaacatggcatctctaactcgatccttgacaccttcatgaatcatctacagtctgattgtaaccattcgctctctttcatgtttactgatgatgtcgtctgaacacatttcaaggagttggcacactccag

SEQ ID NO: 5351 - DNA, 208 bp, Bos taurus
  Clone ID: 41-LIB34-077-Q1-E1-C2
tcgtataacagtgatctgtccgtgggctcacacgggcggccctgtgcgtgcaggtcggggcaggggtgccccgcaggagctgagcctcagcctcatcccctcctttgcctcccagtcaagcctgctggggggtctgagcaccacagccagagcacccccgccttggcagcgactgctactattggcccagccagcggatcatccacct

SEQ ID NO: 5352 - DNA, 409 bp, Bos taurus
  Clone ID: 42-LIB34-006-Q1-E1-C6
ggctgaagaaacacttaagttctggaaatagcgacccagtatcatggctggcagccctaatgaagattcagaaggaagccgaattacttacgtgaaaggagacctatttgcatgtccccaaacagactctttagtgcattgtatcagtgaggactgtcgaatgggcgctgggatagctgtcctcttcaagaagaaatttggaggagtgcaggaactgttgaatcaacagaaaaagtctggagaagtggctgttctgaagagagatgggcgatatatatattacctgattacaaagaaaagggcttcacacaagccaacttatgaaaacttacggaagagtttagaggctatgaagtcccattgtctgaagaatggagtccacgacctttccatgccaaggatcggatgt

SEQ ID NO: 5353 - DNA, 389 bp, Bos taurus
  Clone ID: 42-LIB34-015-Q1-E1-C6
cctggtgagacccacaccattgcaatgattatcttgagcacttaaattccagtgttggctgttgatgtatttgatattctgcttgtctccccatggttgaaatatgtctgaagaatagcagcataatctcttggctgtttatacttttttaaactttcctgtgttgtaaatattgtatacttttggtgattccagctatgtaacctctatgctctgtaaggtgattatttgtatatagcaacatggcccagtgatattatataggttcccaatggagaggttattgagtgacctttgcattagtttaaacactaccagaaaaatgctgagccaactataaacactcaattttgtaggttttccaaattgtacttattactgcttttgat

SEQ ID NO: 5354 - DNA, 408 bp, Bos taurus
  Clone ID: 42-LIB34-017-Q1-E1-C10
agggtccttgcagacagcaagcaatgaaaacacaaacttttaattagatgagacaaaatgatgtgatggagggagactgcacaagttctccatgtgttttgtcttgggcaaattaacctctctgagctgaagtttccttgggtccaaaaaaagaggatagtataatataggcacatgggacctctgggaggatttaaataagcaaatacactggcagctgctcagtgaatattaactctttctttagcgtccctttccttttgacacagaacttgcttagttgcacttggctctcaccatctgagaaagatgtcaatgcctgtggagacatcttacctcttaaccagactctaaactcctggtgaccttgtcttctccatcctcatatacatcaggcctaacgcagtg

SEQ ID NO: 5355 - DNA, 64 bp, Bos taurus
  Clone ID: 42-LIB34-021-Q1-E1-C6
tacatgcttgccacatcgtaaaccttagccctaggactcatccatgagcgctacctgaccgcgc

SEQ ID NO: 5356 - DNA, 223 bp, Bos taurus
  Clone ID: 42-LIB34-022-Q1-E1-C10
tagcccgagaattgttgtatgggggcacctccccctaacagccaaaacaattttaaaaattacaacccctcaaggcaagcaacccaagggacttcgaacaaaacctccgaacaaccggaccaaccgtgcacaatccaaggaatccaagttgaatacaaagacatccccaaaaacaacaagaaccaaatttgtacctctaaacaatggctcctcacacccgccc

SEQ ID NO: 5357 - DNA, 362 bp, Bos taurus
  Clone ID: 42-LIB34-025-Q1-E1-C6
cagacttactctgtattttcataatcaattcgtcaatataatgaactaaaaacgaaaagtaaaaatgagttcctgagtaaacatgccagtgtttcctgtgtttgtgagtggaagtgcaagtggagtagtattaatttctagcattgtagaaaaaaggccaaaagatcacattggttaatttttccaaactgtaacttttaagtattaaaatggtatgtttttttagtaacttagacatggaaataaaacatatatactcattaatgcacagcacaatagacttatagacagagattacttctgcttttatgcgtaaaaaagacatgctcaaaaatattccacaagaaagatgattctttttt

SEQ ID NO: 5358 - DNA, 420 bp, Bos taurus
  Clone ID: 42-LIB34-028-Q1-E1-C6
gcatctgagagggattgatcagcacttttatgaccgcagcagcaccactatctgggcaaatccttattacccagctggtaatttcatcctggaaatgaacctctttttggagttacaaatgttctgagttaatacaaggaaagtattaaaggtgatttgggaataagaacgcatatagattttaggtaatgaagacttttaaaataaatacaattgtccataaaattatttggaatgtgatggtagctattacacttcttcagtctctgacgttaatactgatgagtaaagaaagttgaaagaatcaactgaaaagctacagttttcttctgaatgtttatattttagtatgtattgttgtgtattttaggaaaaatgggagacaaaagatttccagagtgccttaacacgttaacacac

SEQ ID NO: 5359 - DNA, 310 bp, Bos taurus
  Clone ID: 42-LIB34-033-Q1-E1-C6
atcatctacaagttgattgaaagcaataaaaaataatgatcccttctattaacataaagcttaagcttaaaacttgtcactgcttttaacaacaacaaaaaaaatgatgccaattcaatatgagttctcaggtacatctcatgtacatcacaaagtcagacatcacattttggtcagggtatttttttgtatatgtagattttatattacttatacacaagcaaattaatataaatggtcagttatttcaattgactataatctttcaagttaaaaattttttaacttaaaaaaagttttaacacaagat

SEQ ID NO: 5360 - DNA, 407 bp, Bos taurus
  unsure (383): Clone ID: 42-LIB34-038-Q1-E1-C10
gtttaaaagaattcagattactaatgcattttagtgatgttgaattagtccacaattttaaccttaccaaattaaaacattgaaaaatcatgtgagtattgccctccaccctcccttcacaaagtgttgcttggagcttctttcaactgcacccaaaaaaagaattttagtaaatgtgtttcttttttcaaacatatagaatgtttatttccatcctactgcctctaaagaggcattttagatgttgaattagtccacaattttaaccttagcaaattaaaacattgaaaaatcatgtgagtattgccctccaccctcccttcacaaagtgttacttggagcttccttcaactgcacccaaaaaaagaattttagtaaatgtngttctttttcaaacatatagaatg

SEQ ID NO: 5361 - DNA, 435 bp, Bos taurus
  Clone ID: 42-LIB34-039-Q1-E1-C6
cagttacctgtgggtagtattaaaatctgaaattggaaaagggaagatacggactccacctgacattctcttgcctaggcaaggtcagggttccttgtggaagaattcttcacagtcgtggaagttgataagtggcctgaattaatttaaagggaccttgtggcatcacataataggtctgtatgtttcttggagatgtgattgaaatctcagccaaattaagaatggttttgccacttataaataaaagaaccatcaacaaaatgtggaactagttaccatagaataaaggaaaggcatttatgtttcaacaattcatacaagcaacacaactgaataaaaacagccctaattcgtttttacttaagaaacagccatgtttggaaaaaatcaggttaagttggatggagttatagatattttaattaaagagag

SEQ ID NO: 5362 - DNA, 391 bp, Bos taurus
  Clone ID: 42-LIB34-044-Q1-E1-C10
aacataattttgctgtcttaatacaagttatgcttcagaacagatagcccctctctgtacaaatgtaggataaatatgtgtaccctaaaatctaacctagtaatctattctgttggcaataaattgagaatttctggtttgctttgtcttattcaagtgagaatcactctttctaagtgtatagctcatccaaacaaaaaccatgggcagcaaatcagtaaaaatgtcatgggggttttttcccttggttcttacccaagatccttatacctttatattaatgagagttttcaagtgaaagaggataaatacatgattgtaaaccatgaagagaacaatgcagtatcttatttattgaataatacagtatttgatgcatgttgtacatgcc

SEQ ID NO: 5363 - DNA, 383 bp, Bos taurus
  Clone ID: 42-LIB34-045-Q1-E1-C6
catttatgttatggggggtgggggtagggaattgagttgataggctcaaaaatccccatgtatgtatctgtctattgggcatatgttaaatttgaaacctgagtgatatattcaatagtttggtaatgctcttcttcagtgtttacaatattaccataatcatctacaagaaaatgagtgtcctatttgcaaataattatcaatactaaggtagttcttttaatttagcaggtctaaaataggatttagttcattttagcttgaataggtgtttgctaacattgatttgccatttaatacattcttgacctattgccaataaaaacaaaattgctaacactacaacgagatgcaaattaatattctcgcacacttttacaaca

SEQ ID NO: 5364 - DNA, 233 bp, Bos taurus
  Clone ID: 42-LIB34-051-Q1-E1-C6
acagtccggttgagtgcagcgtgaattcttctatgatactattttcacgtaaagatcactttcgaccgtacgtattagaagaaacatagtggcaactctgtcactgtggatttaaacagatgctcacaggggaatatgtggtgatgtcaaatattcttacagctagatgcgcaaggttctagatgataacgtgctcatcatcttagataataagttctgttcccggttagtga

SEQ ID NO: 5365 - DNA, 234 bp, Bos taurus
  Clone ID: 42-LIB34-052-Q1-E1-C6
cccacgcgtccgactagttctagatcgcgagcggccgcccgttttttttttttttttttaaatattggactatttattgcaaagctggattgacagctcaagcagcacggaaacagaccacacaaggcccttttgtaacatagaaatcagggactagacaaggacactgaggatgagggacacgaccagagacacactaacagtcacctcctctactcgtgggaacttccctgg

SEQ ID NO: 5366 - DNA, 302 bp, Bos taurus
  Clone ID: 42-LIB34-056-Q1-E1-C6
gatcctccgagtctcctgctgaaaccggaccagaacgtgtacttccactcgaccgtcgtcctcttgacttcttgtcccgcccctgcgaccagaattaaaactcctcgacttcgagaactttgtgagccagacggcacgaggactccagcggcagcacaggtggcagatttaacccctttgcttgttgagtcatgccagctaccatgaagggccaggtgtgcgtggtgactggtgcctccaggggtattggcaggggcatcgctttgcagctctgccaagcaggtgccacagtttacatcact

SEQ ID NO: 5367 - DNA, 252 bp, Bos taurus
  Clone ID: 42-LIB34-058-Q1-E1-C10
ccgggactcgtgggtcaatacaagcctctagagtgagtcttaatacgagcgcgatagtgggtcaacacggaagctgagtccactcaactaaaatataggctaagacaaggtcatcatcggcatcagtgtccacacatgaaaaccaagagtaaggtccccatttgccaccatgacgcaagcagagtctgttgttttgtccaaaatcaaaactgcacatccagagatcagagatttcaaagattatccgggaaa

SEQ ID NO: 5368 - DNA, 108 bp, Bos taurus
  Clone ID: 42-LIB34-059-Q1-E1-C10
ctagttctagatcgcgagcggccgcccttttttttctctttttttccttctcttttttttttttctttccttttgtttttctcatttctttggggtcctcagtctcat

SEQ ID NO: 5369 - DNA, 237 bp, Bos taurus
  Clone ID: 42-LIB34-060-Q1-E1-C6
ggggagactggtgggttgcggtccacggggttgcaaagagtcagacacagtgaagcaacttaacagcatgcatgcaaggtcattcgacatttacctctttgaagaaccggcaaacctatttccagagcaactgcaccatttgacttcttcatcagcaatgtacaaggggcccaatttctccatattcttgaaacatgtgctgttgattttctattattattattattaatacagcct

SEQ ID NO: 5370 - DNA, 413 bp, Bos taurus
  Clone ID: 42-LIB34-061-Q1-E1-C6
aaagaaagcttaaaatttgaatgaaaacatttcatatgaagccaagtttgtgactgagatcaccctactgtttaataactcagaaaattttcacatgcagactgtttggaattttatatgttatgaaaataacacattacttaatctcagctctacttaaagtgattcacgatatttatcttttctgtttgtaatgtgtaagatgaatccagaatccttttattaaagtgaccctaaataggaggaatagtgtcctttctgattactaatgtattatttcacaaatacaagataaaatatattcccaatttcaagaaatcttatttctccaactaaatacttatcagagatagaaatacattttcctgtaagtttaaagtccaaaaggattacactttaggatttggttaaaa

SEQ ID NO: 5371 - DNA, 299 bp, Bos taurus
  unsure (162): Clone ID: 42-LIB34-063-Q1-E1-C10
agaaaaaatgcgagacgccgcagatccttcaccaccaaacaaaatgttgcggagatctgatagtcctgaaaacaaatacagtgacagcacaggtcacagtaaggccaaaaatgtgcatattcacagagttagagagagggatggtgggaccagttactctcnccaagaaaattcacacaaccacagtgctcttcatagttcaaattcacattcttctaatccaagcaataatccaagcaaaacttcagatgcaccttatgattctgcagatgactggtctgagcatattagctcttctg

SEQ ID NO: 5372 - DNA, 139 bp, Bos taurus
  unsure (111)...(112): unsure at all n locations; Clone ID: 42-LIB34-063-Q1-E1-C6
taaagggttttcaaaggaaaaactcccaagagtccaaaaatgcagggttctaactcaaagcctggtaaaaaaccctaacggattcagtgtgttttgttcacccatggacannaaaggatactgggagaaacctcacata

SEQ ID NO: 5373 - DNA, 200 bp, Bos taurus
  Clone ID: 42-LIB34-065-Q1-E1-C10
agcagttctaagtgtttatgaaggatctgcatgcttgcgcctcccgacgtctcagaacactggcagccttacggagactgaatccacagcttctttaaagagaaagatgcaggtgaactgttatcctgttaatatatagaaaacaacagacacacatgagtacatgcaaatacgtgtgaatatttacacgcagggatatc

SEQ ID NO: 5374 - DNA, 215 bp, Bos taurus
  Clone ID: 42-LIB34-068-Q1-E1-C6
caaatccctagtcacacacacaggtagagatatttgagtctctttgctgtttcctccagtaccttaatctggacttcatttgtcatctttcaattgacttaagagaaccggtaggtccttcctcaacctacaatactgttcctgcccagaaatgggacctgtctgggaagcgtgtcttcctccccctcccccaggaacgtgtccagcatcggtag

SEQ ID NO: 5375 - DNA, 217 bp, Bos taurus
  Clone ID: 42-LIB34-072-Q1-E1-C6
aagcatatccacaggcagaagtgaagctcgcaacctaatgctagttacaggtagtgtcagtatgcacagcagtctatgttgaaagtctcgaaactcattagtccaaaacaggtaacgttgggactttaactccaggtgatatgtcctgcatgattttacagacactgttcagcaattgtcgcgagaatatcctggatcgccgttagtataaacgatt

SEQ ID NO: 5376 - DNA, 206 bp, Bos taurus
  Clone ID: 42-LIB34-074-Q1-E1-C6
agtgagtcatgaggatatacccactgccacataccgctgctacctctgtcttccgaggttctgatatcatggtgcttaaggggatcgtggggtctctctgggggtatggtgtcaagcacggatgtgacgtctcacgcaatgtcttgtttctggaacactgctcccatctgagtttgtaagtgtgttctatctttcttttatggaaa

SEQ ID NO: 5377 - DNA, 117 bp, Bos taurus
  Clone ID: 42-LIB34-077-Q1-E1-C6
gtcgctaaaccctatagtacgtcgtattaagcgcgatggcactcatagactgactcaagatgcccattacgatgcggcttgagctttagcgtcccacgttctctcgtgatggctcct

SEQ ID NO: 5378 - DNA, 444 bp, Bos taurus
  Clone ID: 42-LIB34-078-Q1-E1-C10
tcgtattagctccctggagcgggggccacggtcctgtagtctgcaggccccctcagctccgtgtcctcttggccagtgagcgtcggactcggacctccaagctcaagctcagcggaggcagaaacccacccgttccgcctagaacgagggttgctctgacgcctgctttggaggcgggtcctggcgggaggcgcctcctaggagaagtggggtgctgtcccaactacaaaaagcctcgcaccccgacccttctccacctctgtgcatcttctcccgactcgacgtcgtcgttacagggaagaagaagcgggtgagaaaaacttctgtttccaccgttttgcccatttctgcagatttgttccgaggccgaagcatctccaaggcagtgatggctctccagaggacccaggcctttcttctgctcttgctgctgaccctgctggg

SEQ ID NO: 5379 - DNA, 179 bp, Bos taurus
  Clone ID: 42-LIB34-080-Q1-E1-C6
acccacgcgtcagaatttccagtagagcttgaaaaagtacattgtgatggaatttcatctttaacattttataaccttacacttgcttcttcacaaatcaacgggctcttgacccgtcgatttgatcgagagcttgcggtcggcttataaacgtgatgacttgtactcctgcgaaatgt

SEQ ID NO: 5380 - DNA, 396 bp, Bos taurus
  Clone ID: 43-LIB34-001-Q1-E1-C4
taaatttatatcaataagttaattaaaattaataagatggcaagaaaatggaaccaaaagaaccacgcttgaccagattagggttctgtcgcacatttaggtaaaattttgtaaacatgaagacatgtcacattagactcagaataccctcttggaaaatcgtatagattttgaaaaattgtgtataaaagatgatcattctttaatactactaattttcttaagatgtcacacagttgtggtgtcctttgtggttgtatatttcctttttaaagtaatatgttagtgcatgctgtttataactcacagatgatctgctcatgttttttgacaatttagtaaataaattaaagaaaggcaagctgagacgttcaagaaggtaaagaaatgaatttt

SEQ ID NO: 5381 - DNA, 402 bp, Bos taurus
  unsure (129): Clone ID: 43-LIB34-004-Q1-E1-C4
ggggcggggcgtcctgggaagagagtggacgaggtgcggaaagtccgcgttccagagagcctcctgtgctttgaggccgaggttagagtcctgggatcccggcaggtctctgctgcttttgccacccangcccgctccgagcgccatggcccagccaccggccgacgtcagcgaggacgattgtctcccggagtaccgccacctcttccatccggacttgctccaggacaaggtggctttcatcacgggtggtggctctggaattgggttccggattgctgagattttcatgcggcacggctgtcacacagtcatcgccagcagaagtcttcccagagtatcgatggctgccagaaagctggccgctggcaccgggcaaaggtgcctccctccgtcccggga

SEQ ID NO: 5382 - DNA, 386 bp, Bos taurus
  Clone ID: 43-LIB34-005-Q1-E1-C4
gatttccccatgtgatccctgtgtaaagacaacattgaaaacagtcctaaaaaatctggggtccaagggattctgagactctgtcacatgaacagaaggtccagactgttctcagtcctcacagacacacaaagtcatggtaattcacatatgtcacttatgtaataaattaagattgatgatgactaaatatacggggtattctacttttaacagttatgtcagaaattgcaagttgtgaataacacagcatatgacatgaagaccagggactccagtttatgtccaagagctgctgttgattctgttttcacatctgtacaagtgttgccctgtttttagtccttagaatagttagctaagtgttaattgctgagcacactgaa

SEQ ID NO: 5383 - DNA, 430 bp, Bos taurus
  Clone ID: 43-LIB34-016-Q1-E1-C4
ctcacgggtcgacgcacgcctctaaactgagtcgtatggagaacttcacaaccagctgtaatcgaagaactgtttgctgccagcaggctaacttagagccagccagggcactttgaatgagaccgttcttaagggaggtctttttataacgggacctttctaaccaagtgcttcccaggctagaccttgcttgtcctctcgtggggagttttcacttgactccagcgtggactctcgttgccggtgagataggctaatgaccccatccttaatctcatctgccgctgtgtcatggatggtttcagacagatgcccagacacaagctctgctgtcttcctgatgcagacccttatccgtttgtggcagtttggttgctagtggcaacgtcaccactgcctgctcgagagatcgtgcaaccagtcgaggatg

SEQ ID NO: 5384 - DNA, 354 bp, Bos taurus
  Clone ID: 43-LIB34-018-Q1-E1-C12
aaaaagtttaagagtttccaattattaatctttgtttttagaatcagttaagagactgctccttgtactggagatactagcatatgttcgtaatgttaccttaaaattatctttattctataagtcccatacatactggttaaattctttaaagagttgggccactatcatggatggtttcactgccatcggccctgttgatgtattataaatggcattatctacttattttaatgcttaaagttttatataaaacgctttatttagaaaacttacataatatagtggtgtctgccttgccatgtaccaatttcacttgaaatttgacaccaattgcagtggtctggggtggag

SEQ ID NO: 5385 - DNA, 431 bp, Bos taurus
  unsure (388),(415): unsure at all n locations; Clone ID: 43-LIB34-020-Q1-E2-C4
attcttgcaagtttgtggaagcagaggagtcttgaacccacatcagcattgatctaagtgtaccactttaagttcgtgggatctggagctcctggtctagcaagccatgaaaatgccaataaatgttttgtaaatagcttttatttaaacatccattttgttcgaccttgaagctttactaatatgctgaagaacaaacagccgatgccagtgaatattcgggcttcgatgcagcaacagcagcagctagccagtgccagaaacagaagactggcccagcagatggagaatagaccctctgtccaggcagcattaaaacttaagcagaagagcttaaagcagcgcctgggtaagagtaacatccaggcacggttaggccgacccatangggccttggccaggggagcaatcggangaagaagcctgcccat

SEQ ID NO: 5386 - DNA, 432 bp, Bos taurus
  Clone ID: 43-LIB34-026-Q1-E1-C12
cacaggtctaggactcgcgggtcgacaccatcctggacattgaggcctatgacgccatcgccgtcgatgcttcgcagccgcagccgccagcggcactcaagattgacggggtgctcaaggcgctgagcctggcgtccccaagcccaaagggtggcttctcggataagcctatgtacaccgagaagcccaccaagtacgccggcagcccgatgagcggtggcgcaccgcgcttcagccaccagcctcgctatgttgggatgtcaagcttcaggaatcgagcaaatcctgcgcctgcagtgatgcattgctctggctgccaccgccgtctcatcgttcaagtcttcttctacgagtagtaagtaatggtgtccgtttgtatattatattaactacgttgaaatgaaatgacctaataaaaacgcaacagaatgc

SEQ ID NO: 5387 - DNA, 403 bp, Bos taurus
  Clone ID: 43-LIB34-027-Q1-E1-C12
ctcacagatatgtatggaaataatattttaccatctatctgggcatccccattcaagttgatttgtaaaattaagcatctcacacagctagtgaacagttgagctgaggttggattccagtttttctcttcccttccttcttttcctcctcctgtttcattcttgcacacaaaaaaactattaaattgaattttaggagaacttgacagaaagaagtagaggtgagcttgaagttaatgacctttaggtaaatatttcttcgagtgtataatgaggataataatgtacctttcttgtagctccgttgcacagaatccataagacatgtataaagcactttgaccaatgtctatttaatactaggatgtgagttacctatgatgtgcatgcatgctcagtcatg

SEQ ID NO: 5388 - DNA, 88 bp, Bos taurus
  Clone ID: 43-LIB34-027-Q1-E1-C4
cacgagctgacgcccttttttgcattgatataccccaccaccatactccttcttctctcctctgattatctccataacctgtggcctc

SEQ ID NO: 5389 - DNA, 326 bp, Bos taurus
  Clone ID: 43-LIB34-028-Q1-E1-C4
gatttaaaaacatagtcttaatgtatatgattactactaaatatatcagtgttagatatttgggttttcagtttagaaaattcagcatttcattgacatgtaatgaagtatgtttagcttgagtcgtaagattttataaaaaatagggcttccatgatttgggatgtgaatgctaaaacttatagataaattaattagatgtgtaatttggttatgaaatcttttctaaaatgacaccaccagaaaattaatagattaagtttttgagataagtatttgtctggattggttaaaaagaatctgtcgtaagaggttttcgtttaaaa

SEQ ID NO: 5390 - DNA, 112 bp, Bos taurus
  Clone ID: 43-LIB34-030-Q1-E1-C4
catagtttgtggaacctctggtcctgatcattttagccagggaaatttttaaagctggtatttgcattcagtgaacatttaaaaatctcaataaagcatttctggaatgttt

SEQ ID NO: 5391 - DNA, 274 bp, Bos taurus
  Clone ID: 43-LIB34-039-Q1-E1-C12
acactgcgcttatgtacgttgtgcttcaacagctgacgatgtggtcaacttcgtcaggtatggggaatccaggtcttgtcaagtgaatgctccacaccaaatttcatcgtccaatgtggtgcaggcgtgggtcatccatccctaggacatccgagctcagttggtgaagaacttatagggtttcccgtgcacagtgcagtcgacaagatgaattcagaggacatgcacacatgtagctcatctatctgggatgacagatcatgcacagccactg

SEQ ID NO: 5392 - DNA, 61 bp, Bos taurus
  Clone ID: 43-LIB34-040-Q1-E1-C4
acgcgtcagcacgcctccggattctgctgtcataggtcatggcgctgaaggtggccctggc

SEQ ID NO: 5393 - DNA, 398 bp, Bos taurus
  Clone ID: 43-LIB34-045-Q1-E1-C12
cataagcctgttttattatcaagtccttcagtgggacagaggctagaagaaaggtgactgggagcgagtagagaggcctaagagcttccatttcctgcccaccctacagtcagacattgctggtcaccatgctcctttgctggtccacacagtcctctgaccctcctcttccccaaccagaggcgctgtttttggaggaaccccttgagccacacctgattgaccctgaattgctttccatgtggcattgaccaccgtctgaccctcgacctccacgtctgcatacactcagggtttcttcagactgcacactgactgtggttttgattagttacagggagggacagttctgcccgattgtgtgttatactaccagtttctgaaattccttggagtgt

SEQ ID NO: 5394 - DNA, 432 bp, Bos taurus
  Clone ID: 43-LIB34-050-Q1-E1-C4
cagacgcgtgagcggggatggagagtccgtgggatctctttacggcctctggactggaggccgagcccccgcccgcggccgagccccgcgcccggcgtctccgcccggggtgctctccgcagtttcctggcttggaagcctcgggaacatggcgaggcagcggtggtttaacgggaaggacggtgactgttagcctgtgaacgaaagcgagagtgagccgcctcacgctccggaccaagagtgatcttgaacttgtggctgctactagatttttgcccacacctcctcgtatgctgcggcttctccactggagtggggccagggtgaccgtggacttgccgcaagtcagacggctgcaggtcacagcaggtccagtctatccacctttgagcggcggcggcatgtcctttcccaccctcgatgacccccgct

SEQ ID NO: 5395 - DNA, 233 bp, Bos taurus
  Clone ID: 43-LIB34-051-Q1-E1-C4
gaagaaacttgaaagtgcaaggaaagtaaatctctccctaatgcatatcccatcagtcattttatgggaatacttttcatatgtagagatactctctcaagcttaaccagtggcaacaaagtcatagcttgtgacatcgaatccactggccaccatgaagcagaatcattcctcatcacaattaatggcgtttttttttttttaacaagacgtgaataactaccaagtgatga

SEQ ID NO: 5396 - DNA, 238 bp, Bos taurus
  Clone ID: 43-LIB34-054-Q1-E1-C4
ggaaacccaggcgccgttgcctcagcggagcccgggctgacgaggcagggcagcgggttaaaccggagcagttccgcgcggggtggggaggccatggcgtccggcagtaactggctgtctggcgtgaatgtcgtgctggtgatggcctacgggagcctggtgtttgtactgctatttatttttgtgaagaggcaaatcatgcgctttgcaatgaaatcccgaaggggacctcatgtcc

SEQ ID NO: 5397 - DNA, 375 bp, Bos taurus
  Clone ID: 43-LIB34-056-Q1-E1-C4
aaaaaaacaacttgtgttatattttggtaaaaatgaacccacttccttcttctgagagtacttactgatagagctgaagggggctcctttttacatttaaggactaaactggatatacctcctgtaattaagtaaatttccagcacttctcttatctgctccacccccatcccacctcctttatcatgttaaacagtcctttggcttttcttattcctcctctcctggagagctgtgattagaaaccacacccatccttgaatgaggtgcttgaaaggggggtggggtaagaaggaggctggctacctgtgaacaaacattggcagcaatgacggaaaatgagtgtccctggactttggactagattacagccag

SEQ ID NO: 5398 - DNA, 222 bp, Bos taurus
  Clone ID: 43-LIB34-057-Q1-E1-C12
gagctgtggtactggttaaaaaagtgagtaaatgcatttacagcaatacatttctagtaaccacagaaatgtattgtctgtgtgaattaaaacttcacagattgacaatttatctgacaaatgttataatagttacttccattctgtcttgtcctgatttgaattttctgttcacgtctaacaattttaacaggtttttcccatgaccatttaacattagat

SEQ ID NO: 5399 - DNA, 315 bp, Bos taurus
  Clone ID: 43-LIB34-060-Q1-E1-C12
gtgaggaggtggtcaacgaaagcgcttcaatgcctgggggaaggagaagagtcgggtccatgaacattgcaggtttctggattttagctcagtttgtcctcttacttgtggccaatgtcaagtcttcagcagactctgagctgtgtggacctcgtggagcccgaggacctccgggactcagtggtcttccagggccacctggttatacaggacccataggtatgccaggactaacagggagacctgggcttcctggactggttgagaagtgcccacccctgcctcagtctgccttttccgtcaagctgagtgggc

SEQ ID NO: 5400 - DNA, 238 bp, Bos taurus
  Clone ID: 43-LIB34-060-Q1-E1-C4
cttttgtgactactcacaaatatatcagcttgctctggtctctctccttatatagctctattcttagaaatataatttgaatatgatctttgaaattgtgcagattgttgctgtcttgtgaaagtattctcaaacagaaaaacataactttgtcatcttgatatttcttggtctagtaataactgttgtacttgacatcttatgttcctaacttgtagaattgttctgtcaaactaaa

SEQ ID NO: 5401 - DNA, 175 bp, Bos taurus
  Clone ID: 43-LIB34-063-Q1-E1-C4
gaatttgggctcaggaagtgatgatacatccatatcgcacacacgtgctcgtttcctcgagcggatgcatcagatgtctcaggattacactgacacactgaaggaaactggtcaagcactgaaccctgcaactcacgaagtatgaacaataaccagattatgtgtttcgactttg

SEQ ID NO: 5402 - DNA, 200 bp, Bos taurus
  Clone ID: 43-LIB34-068-Q1-E1-C12
ctagttctagatcgcgagcggccgccctttttttttttttttcatcattctaagccctgagagacttggagaggaaaagaaaaaagaaaaaaatgaacaggaagtgaaagtgacaagaaaatggttacggcatcacttttcgcttttcttttacagtgcacaaccgaagggaaaaaacacatctttttctcgttaacaat

SEQ ID NO: 5403 - DNA, 297 bp, Bos taurus
  Clone ID: 43-LIB34-072-Q1-E1-C12
acggaagcgtgggcagagattgatgaactcgctgagcttcgatatagcttaacgtaggcgccctgcaagcaaaacccgaaagctgcattcaatgtacagtgctgaaacttttaccagagatcaacgcgtcccaataggtctgccattctcctgtcataaacgtacgtgatagacaacattcattctggtccacattgtccaactatgattacacctccaattcctcaaacctaatataccatacagcctgagacgtgcactgtacaatcactgttgatatgataccactgtgattct

SEQ ID NO: 5404 - DNA, 255 bp, Bos taurus
  Clone ID: 43-LIB34-072-Q1-E1-C4
attccggatcgatccacgcctccagacgcattgaatagtacacctggattatacctggcgtgagctctggtcagtcatgatagagttgttgacgttccatatgtcatttgagactgtccttttggcagagtacaacatttttgcattagctcttatgagtgtgatgctagttagtatgtatatgagatatggtgatgtgttcatgcacagggacaggaattaagatgcactcgacgatgatcatatccgcatgca

SEQ ID NO: 5405 - DNA, 436 bp, Bos taurus
  unsure (410): Clone ID: 43-LIB34-080-Q1-E1-C12
gggccgacccacgcgtcagaaaccaacatgttctgtctgccttcgggagtcatagaaattctgtgctagaataggccttgtataattaggtgatcctgtcatttaacagagaaggaaacaagtccataggttgaagtgtcttttctaacatggcgcccgtagtgacaattcggagtagagtcagttcttttttctctcagtccactgttctacttctcttccctttccctcctagttgagttgtcgttgttccgtcgctaagtcgtgtctgactctttgcgaccccatgcagcttgccaatttggggaaaatgtgttcctcatagcagtagttccaaagaccgttgttagatgttctaagggaatgagagtgtgtatggagtggggggaaggactctgtggtcagttaanactgagggatgctgagtttgtttcct

SEQ ID NO: 5406 - DNA, 402 bp, Bos taurus
  Clone ID: 43-LIB34-083-Q1-E1-C4
gggtccacgcacgcgtccgaggacacgtgggtgctacctagattcagatctgcctcttccctttcctttcggaagagttacttaaccactgcatgcctcagtttccctatcggtgcaacagagatagccttaatatccatttgatgacattgctgtgaggattaaatgaaccaatgaattaatacgtgtcaagagctgagaacatgagcctgtactgttgaataatgtccacagtttcttatttgttaccatatatagtagaactctatgtaaccttgctctgtattttctaagtctcctgtaaatgtgttatcatactcccatgatttagaagaactaataataaggaaagagaagattcctagttggcacatgttgatagaagatgtagcagtgacatgg

SEQ ID NO: 5407 - DNA, 349 bp, Bos taurus
  Clone ID: 44-LIB34-006-Q1-E1-C8
atgttgttccctccgtgcaggacgggggcaaccgcagactgacccgcgccgtgccgccgacgtctcctgcatgctggctcctcgaccctcttcactttttttccctgcccccggacggaccggcccaaacctcccgaacttattccgtgtggcagtgagaagctgtcagcgctcaggccataagcctggcacagtggtgagcatgcattccctggtgtacgtgtcacagtgaatctttcctcagacctctgatcaggatgatgcatgaactgaacaattaaaggttccacattcagagatcgtgagatcaataatggcacgatgatcatctcttttcaaagtcattctc

SEQ ID NO: 5408 - DNA, 334 bp, Bos taurus
  Clone ID: 44-LIB34-013-Q1-E1-C8
cattcgtcggtcgacccacgcgaccgaaatgcgtttttttcgagctgaactcttgccagcttgcactctcccatgtcatatacgagtatcagaaatcagaagggcagctttctatagagccgtcaatgcagaatatagttcacaatatctcaccctaaatgaggggttgctcatgtcaagattctcctttgattctctcatgcacagatccagccttaatgcacactctcttcagtacgattggacatgcacaatgagtgacaatgtgcactaaatctcacagagatatgcatactacttctgcaatcataattacatggtcgaatagatcctt

SEQ ID NO: 5409 - DNA, 418 bp, Bos taurus
  Clone ID: 44-LIB34-014-Q1-E1-C8
acgtgcaaggagccacagcccagacatcccctagtaagctgatggcaaacctcagaatactggacctagatagcacgactcaggagccctcagaagaggaaggactactaggagaggcagctggaggtcaggacacaaatgagtcagtgccagtgcaggtctttggagatcatgctgacactgacgaggtcatgttttatgccgtgagaccactgctttggtgtcctcatttggcggcagtatgccccatacctgagacagggctgaatgtgacccaaccttgtcaggactgtggaacactccaggagaactgggtgtgtctgtcttgctatcatgtctactgcggtcgttacatcaacgctcatatgctccagcaccatgaatgttcaggacacccactagtactcagctatgccga

SEQ ID NO: 5410 - DNA, 369 bp, Bos taurus
  Clone ID: 44-LIB34-020-Q1-E2-C8
aaaacaggcatcggtttactgctgcctccttcctggtttcggcttacatttagctagcaaccactgtgtgcctgcgtgctcccactgtccagagccacgcagcaggacccaagttagtgcctgggtacgagagaatgataacgcacccattgttggtgtgatcacctcgctctcgggattagttagtaccaaaacaactgcagccacaatgaattactcattccataatcgggctagatcgttgtaaggggaaacctgcggcaagagatcagacagagcgaggctcccgatgatacttcatgatggttgcgagatcttttggaatctatttacacctagcccaaggagacgcggtccctaagcctccag

SEQ ID NO: 5411 - DNA, 431 bp, Bos taurus
  unsure (280): Clone ID: 44-LIB34-022-Q1-E1-C12
cggacgcgtgggcgctctcgcaccctgtcccagagcagcgagtctgggactctctcttcagggcccccagggcacaccatggaggtctcctgttgaatgatccttgttgtcctggtgtgggacccagccctcacctcccccagtactaacctgggaggtgcccagggcactgggcccaagtgagcacaggaagctgggcagatcatgtggggagatgaccttgatctttgattgctaccctaaccttgacctctaacctgtgatttccctcagctcctgngagagatgtcctaatatctcttagggacccagacccctaaatgatccctctccttcatcttggtgttaggcggagaaggcatgtatccctgctccctaatctgggtgtctgtagctaagggacaagaggttgtggaagttgtccgtggtga

SEQ ID NO: 5412 - DNA, 126 bp, Bos taurus
  Clone ID: 44-LIB34-024-Q1-E1-C12
tatagtgagtcgtattaaacaaaaaaaaaaaaaaaaaaaaaaaaaaaaaaaacaaacccacaaaatacaaaaacaacacaaaaaaacaacaacacaacatacaaaaaaaatacgggagaaacggga

SEQ ID NO: 5413 - DNA, 419 bp, Bos taurus
  unsure (356),(361): unsure at all n locations; Clone ID: 44-LIB34-026-Q1-E1-C8
cttttgttcagctctgtattcgtggggatacagcgagatagaagccccagcctcagccttccatgttgtgtacacctgaaccagttgactaaaaaggcaaagcgctccagtgagtggtgctggctgttcagaggagggacagacagatggcaatcagagtgcatcaggaagaatgctgacctgagctgggtgtgatttggaagatcaatggaaggcattccaggtcgggggcagccaaagcaaagactcacaggattctgccctggccttcagcttttcatgtgatggctggcatcttggggatcttgttttcgaaagattgttggaattcctgtgatcatcatatgaaggcttcncctgncctcatcacatcttatatcccagagttgtcctaaggaacctcaatttagacacccgag

SEQ ID NO: 5414 - DNA, 396 bp, Bos taurus
  unsure (100): Clone ID: 44-LIB34-032-Q1-E1-C8
gacattcctgacccacctgccgctggaactcccaccacctctggagtagtgagagggctggatccgctctgtggaatgctgagcttgaggcctgccttangaggccagggccagccccactcccttctgaccactgctccctgccccttctccttctagagtctgttgcagcatgctcggggcttccagctgccctggacacggctacttctgttggtgctggtctttgccataggtttcctgtgccatgacttccggtcacacacctctttccaggcctccctttctggccagctgcttcagtcatctggtgtcttgcctgctggccaacaagcatgcaccaagatctactcctatagcttgcagggctacagctggctggataagacattccag

SEQ ID NO: 5415 - DNA, 409 bp, Bos taurus
  Clone ID: 44-LIB34-038-Q1-E1-C8
gaagagagtcgttttatcgtgaacttctcccaagggaggtcctgtgataaaactcttgtgaaagaaagaggctaacgttctgttgtttcccttagtgaaatgtagcaagttaatcgaaaagttgattttttcagatttcccaggttttactttagttttggtcatgtttgttaaaatatttcctgtcttggatttccttatcagtttggatggaaaatccttgcttgaaatttgaaaagcaatatttttgtatacctagagtctgataagaggtatataatagcttccttcttttcgtctaaagacaggatatcattcttctttctcgtcttttatcttactcttttcataatagaaagtgactctgagagagtcacaggacctttatacttctagaagacatccctag

SEQ ID NO: 5416 - DNA, 247 bp, Bos taurus
  Clone ID: 44-LIB34-042-Q1-E1-C12
cctctctgtttaaggattaaacctcgtgaagatctgtctatatttctggcatattttggggtgatcctgcctcatgtgactcagaggattctccttttcgtctgagactctcatggctaaggagagtaaacttcactattgataattggtatatgtttgattgacttaccagggaagggataaattctcaacttgtgaaactccaactgacaaagtgttgagctgcgctaatttgtgaattctttcg

SEQ ID NO: 5417 - DNA, 316 bp, Bos taurus
  Clone ID: 44-LIB34-044-Q1-E1-C8
agagccacgccgcctgacttcgccgccgcctggagacggctggccgcacgccaccggccggagagtcctgtgtatggaaactcaaatgagtcagttcagtctagaagggtagtcatttctcatagtatggacaaagctctgaaagaagtgtttgactacagctacagagactacatcctgtcctggtatggaagcctcagcagagacgagggccagctctacgacctgctgtccgaggacttctgggaagtcgccaggcagctgcgccagcgggtgagccacgtggacatgggcaaagtcgtcggcaacgatgtcg

SEQ ID NO: 5418 - DNA, 405 bp, Bos taurus
  Clone ID: 44-LIB34-046-Q1-E1-C8
gtgtacttccactcgaccgtcgtcctcttgacttcttgtcccgcccctgcgaccagaattaaaactcctcgacttcgagaactttgtgagccagacggcacgaggactccagcggcagcacaggtggcagatttaacccctttgcttgttgagtcatgccagctaccatgaagggccacgtgtgcgtggtgactggtgcctccaggggtattggcaggggcatcgctttgcagctctgccaagcaggtgccacagtttacatcactggccgccacctggacacactgcaggccactgctcaggaggcgcaatcccggggaggccggtgtgtgcccgtgggatgtgattcaagccaggagaatgaagtgcgaaacctgtttgagcaggtggatcgagaagagcaag

SEQ ID NO: 5419 - DNA, 377 bp, Bos taurus
  Clone ID: 44-LIB34-047-Q1-E1-C8
gacgaatgtggacactacatagatagaaaagaattaatagaaggctccacaaacagtcgatttctaggccacagtcaatttcttgggtggctcttagtgaggccacagttcacatgaccttataaaccatgagcaaaattcctctgcgatgtgatgaaaaattccagtatgtaagggaagtaagaatgatcacaagtgacttgaatttttttttttttttaatccagatcatgaatatttaaagaaagaaaataattctgaatggggaggcgatgctgcttaggaaccactgagtttttcactaggttctatgaggatttgtagaacagttgccaggtcgagaagcgtcttcactaaaaatcattagtttcagtcag

SEQ ID NO: 5420 - DNA, 330 bp, Bos taurus
  Clone ID: 44-LIB34-049-Q1-E1-C12
actgggtgcaccgagcacgtcagaggtataggaggtagcgacagttgtgtaggtggacgaaggctcacattatatcttgggtctaaggcatgctcgtacgacgttcagactatagtccatcactcagaacttcagagttctctacactccgttgaggacgtatcctattggaattgacacgacctacttcacttcgcaacgtttaagcactgaaattaggagtgacagcttctggtaagtatgccttcagaaataggacctgttactagcttacaacacatagtcggtccgctttggtacatccctaagtcagatcgtcagcaaccaatg

SEQ ID NO: 5421 - DNA, 228 bp, Bos taurus
  Clone ID: 44-LIB34-051-Q1-E1-C8
tagttctagatcgcgagcggccgccctttttttttttttttttttttttttttttttcattctttttttagatttgaatacttcaatcaaagaggtcagtgggaagcagcaactgggggtcgatcaacttcagggggcaagagagacggaaatatgtggcacaactatcctcagtctcttcgagtagggaagccacggaaaacaccgccactccacacgcgggcgggc

SEQ ID NO: 5422 - DNA, 217 bp, Bos taurus
  Clone ID: 44-LIB34-057-Q1-E1-C8
gacagtgccaccatcttgattatcgagaacggggaaaagctctacctcctccgggcgctgcactgattctccagtaacgcgctctgattgagctctcatgaaagcaccgttctcaccgcctgagccactccttgtccaggtctgttagttgtcacggccgcacgctttgccatccctggcgctcccgccaggtttacttcataacaggtgaatagag

SEQ ID NO: 5423 - DNA, 216 bp, Bos taurus
  Clone ID: 44-LIB34-063-Q1-E1-C12
tcccgggccaaccaagcctccgaggcggttagacccgttgctgcggaagggccagcaggccctggaggctccggattggaaggccgggttgccttctccgtaagttccgtaattgcattcgggggccgggttcccggccgggttcgatggctaggcaaaaggcaccgatctcccggaaggaaaggccacgacaaagaattgctcccccttaacaaa

SEQ ID NO: 5424 - DNA, 367 bp, Bos taurus
  Clone ID: 44-LIB34-063-Q1-E1-C8
cccacgcgtccgcagacgcgtgggttaccatggaagcagcacgtctacagctgtggccaacatactgcagcatttccatgctgataggaaaacaggcattcctgagccccaggtatccccaggtaccccaggtgcccggatccactaagtctgttacaggaactcccacctaatttgagcaccacttctgcagaaacttttcgttggacacaagtagacaaagacacacctgtgaaggaggccctgctcctcacctgtcagcctccgcccccacagacctgggcctggcttctttctcgaacactcagccatcggcaagcacagcacaaaagcatggcaactccccagtccttctctgtgctctgct

SEQ ID NO: 5425 - DNA, 125 bp, Bos taurus
  Clone ID: 44-LIB34-064-Q1-E1-C8
cccgggtcaaccaagccttcgaggtttttaaaggattttaatagttaactcctggcctaataaccgcctaacctttccttgctacgaattaataataattacccaaattgcttcctttcaacccc

SEQ ID NO: 5426 - DNA, 233 bp, Bos taurus
  Clone ID: 44-LIB34-067-Q1-E1-C8
gacaaatctgatgaactgaggtttaaattaaagtttaaaatgtttccatcccttagttgtcccaggttcttcctccttcactgtggtatatcctcaaccatcttgaaactcagcagagaaggtgtccttacatgcacagaccaaagttctaacgtgggcacgttagaacatactcggggtcagtatatggaggaccagtggcagcggctcttgatgacctgcagcagaggctt

SEQ ID NO: 5427 - DNA, 158 bp, Bos taurus
  Clone ID: 44-LIB34-070-Q1-E1-C8
gggcagcactggggtagggctgagggcttcgtggctgtgtaggcaggccgagggcgttctcatcatgggctgctgacttcctgacgtcccaccgcctctccactgaatgaggcctgcgaggcacgcatgcgcctctcctactgtctttcctctcaaac

SEQ ID NO: 5428 - DNA, 102 bp, Bos taurus
  Clone ID: 44-LIB34-076-Q1-E1-C12
tacaacatcccaaatagtgatgtcgtattaaaattcagaaccgatcaagaaatggtagtgtctgcacttctggcaaggaacatgaggattccaaaatataaa

SEQ ID NO: 5429 - DNA, 254 bp, Bos taurus
  Clone ID: 45-LIB34-010-Q1-E2-D2
cagactcgtgaggcgcccgcgtcggtgggcggtggcagcctggggaccatggctgacctcgaacccggcctggccattcccctgtggctggtggacgacgacctgagctgcatcatctctcacgatctgctggtctgtcccactacgctgccctgcggccacaccttctgccgcgactgcctgctagacctgtcggccacgaggtgcagccggttctgccctacctgccacgagggtgttcctcggctgccgca

SEQ ID NO: 5430 - DNA, 444 bp, Bos taurus
  Clone ID: 45-LIB34-013-Q1-E1-D10
ggtcgacggacgcgtccgagataaatgtatttgatctcttcactagtattctcaattgagtgaccatacaagtgaaaccattcaaatttagatttggggaatggtaaaggaatcaactttttatattgcttgttgggggaaaatactgaagattatcatttcatgggtcagcagattgacttgttaagatggtaaatcagatcataagcatccagttaaagacatacaggggttgaaaactatttgaatctttgagatgttattgtcctacagacagctaaatcagtacacctaaaccagtagtatgacaacctgatgcactgcctaaagaaaatgtgaatttttttttttaagagaatagtattttaatgaactgtatggtggtgaatgtgtgaatggcactacgggctatttagaatgatacaagccattggtcctcttgtg

SEQ ID NO: 5431 - DNA, 371 bp, Bos taurus
  Clone ID: 45-LIB34-020-Q1-E1-D10
ctagttctaagatcgcgagcggccgcccttttatgtttgttttatgtttctccatgtctatactcttacatttcatctagagatgaatccattagtgtccatgtcatggacatcggttctatgtaaaatgatctcaatctttttgacactattgaaaatggtcatattcccctatgtattcaattgtgcaatgctagtacaatcgagtaaattccactttagtatattgaaaatgaatcattctgagtcaatgagatccaataagggtctagtgtaagtagcttcagaagatttactacatatttgatcagctcaatgagtaagagcacatcattaatgttatctattcccaactgaatgattttcacatt

SEQ ID NO: 5432 - DNA, 377 bp, Bos taurus
  Clone ID: 45-LIB34-020-Q1-E2-D10
ctagttctaagatcgcgagcggccgcccttttatttttgtgatttgtttctccatgtctatactccgcaatctcatcaggcagatgaattctttcgtgtccaagtcatggaaatcagttctatgataatgatatcaatctttttgcaactattgagaatggtcttattcccctaagtattgaattgtgcaatggcagtacaatgagttaaactccactatagtatattgaaaatgaaccattcggagtcaatgagatccaatcagtgtttagtggaagtagcttcagaagatttaccacatatttgatcagctcaatgagtaagagcacatcagtaatgtaatctatgcccaactgagatgcttttcacattatcat

SEQ ID NO: 5433 - DNA, 438 bp, Bos taurus
  unsure (358),(387): unsure at all n locations; Clone ID: 45-LIB34-021-Q1-E1-D2
gtgattggatttactacttatggttccagggagcctttttacattgctgtcctgtgcattccccagttctgatgcaaactgttctgtttacataccttctctgttgtgtcagcactctgattctagtgaggtgacagttaagacttcagagggccgttcagcattgcctaatgtttttgcttctcaaatctgtgtagtacactggtttgtaatctttgtgtcttcattgaacctgagtgtctttgctatttctcttcttcctcaaagaaatatattgtcttatatactcttttaagaaaaaagagtaaagaagggtatctttctttttctcatcttctttgagttggaaacaaaacanaaaaaggactctagaagatagacatttanatttaaatagcttagtggaaaaagtttaagagtttcaattattaatctttg

SEQ ID NO: 5434 - DNA, 423 bp, Bos taurus
  Clone ID: 45-LIB34-031-Q1-E1-D2
cggacgcgtgggaaaggaacagagtcactttgtggaccacagctaaactgtggatattttcccactcatgtaagagtcttccagagtctgaacctctggaaatgaaggtgcactttcctgccagctccagggagatgggcctcagagttcgccagccattggccttatcatccagctctgagagctcctcagaaaacgtagagagtcactgcgtccatcaggagaagcaatttaagagaatgccaagaaatggcagaagcacatgggaaaagcatatactctgtatgtgcctgtgcaagtgtgtacgtttgtggagtattttgggggtaaatgtagttagttttgttcttccctctataaagtgtgaacatgtacaagttaagactggattccatatacatcaggaagtgttccaaagatgtt

SEQ ID NO: 5435 - DNA, 177 bp, Bos taurus
  Clone ID: 45-LIB34-033-Q1-E1-D10
caggaccgagactcgcgggtccacacacgcgtccggagtgattcacacaagcgatgcggaaagtagcgcaatggccaaagatctacgttgatttgctgatgttccatcgaaagcaaaccgctggcaggcacccacgattcccaagatggagggagtacctcgcaaggtttcacgctc

SEQ ID NO: 5436 - DNA, 357 bp, Bos taurus
  Clone ID: 45-LIB34-036-Q1-E1-D2
agtgggatggaaacaggcattatcactctcaacgtaaggtttacccgcactctcagtaatgtgaagtctatgaaactagtagtgaatgtgatgtgagcatgaactcgtaatactttgtgtagagcacacatgaccacatctcagttatggtattgtcaacacttgggaaaattggcactttgtacgggcgatatctctatgacaaactgctacaaatcaagagactatgtgaaactatcgattgggttgacacatatcatattatcaactactcctatgagatagtatatgaccatactttataacagatcctgattaaatgacggaactaaatagtttggggacagtttcagaaca

SEQ ID NO: 5437 - DNA, 241 bp, Bos taurus
  Clone ID: 45-LIB34-039-Q1-E1-D2
atacaactgagatacaacaatccgaagaaaccatggagatgccccactatggaatcccgcactccagtatgcatgacatctcggatctggaacatactgctctggccaggacactacccataatcagcctctaattgggcgaatccgtcccgcacttcagcacagtactccagagaactgtctaaatcgtcttatacatcacagacgactgactgcggctgacagacacttcccgtcatga

SEQ ID NO: 5438 - DNA, 240 bp, Bos taurus
  Clone ID: 45-LIB34-041-Q1-E1-D2
gatacgcgtcgggccacacgtccgccataggctctgaggttacagtgatctcgcatatatttctgcgctttacacatgaagatggatcaggctataacgactctttatgccaccacctgccgccatgcgactgtagagcatcaggagacatgtaccgctgctcacatcactagatgctcagtccattaagaaggctgattggagaggtactgctcggtgtacaaccagtccttgggctgc

SEQ ID NO: 5439 - DNA, 363 bp, Bos taurus
  Clone ID: 45-LIB34-043-Q1-E1-D10
agttaaagtccaataagaacgtaataataaatgacatctaggacactgtgctcagacaagaaagtccattatcattactttcacaatggttttcaaccactattgaaccagaagaaaaaaggggttttctggccgaaccagacaacatctataccctgagcattccaagtcactgacgttgtattacaaacagaccgcagtttctagacaatcaagtccagcattacctaacttgccaagaagaacttaaccaatcacaggaaaggatctgcccgcctaacttaaaatattaagataccaaatgtgggtgattttttcactctaacacatatgcacacagtctgtagtagatctaatcacaca

SEQ ID NO: 5440 - DNA, 275 bp, Bos taurus
  Clone ID: 45-LIB34-048-Q1-E1-D2
agcatatacatatttcatagcattatgcacagatacacgttggagtccagagctcagttaagtgaacagcacgctggtgagagaggctcccccgtgtcgctgactgcctttagtaggtggcaccaccctgtgcacagagcactagggaagagcggtactccagcctcgccgctgaggctgggttcgagcgtgccgggctccggtcatgtctgctcccaacatgggtagcacatgggtcactgtggaggagttagttctaacctgggttattgtta

SEQ ID NO: 5441 - DNA, 437 bp, Bos taurus
  Clone ID: 45-LIB34-050-Q1-E1-D10
ttcccgtagccacccacgcctccgatctaacaccaaagttcaaaagcatcaattattcagcactcaagctttctttatgttttaacatactttaattcttattactgtaaaacaggcattccttgtataaatggctattcagatataacctgggctgaaatgtggacatgcatttctctgtttcagttttgcctcctcatcacccttttatttgtagtctagggtagggcagcctagatagccccttacttgtcagagctgattccttagagtaaagtcaggatctagattagaatcagaccctgggactatgtccagggataaacttcagtgaacctgtgggttgacatattttaagtgaaaccaaggagataactttgatgtctactattattttaaaaccgtgggtcaatatcaagaattgatgttattagcag

SEQ ID NO: 5442 - DNA, 384 bp, Bos taurus
  Clone ID: 45-LIB34-050-Q1-E1-D2
gagacgcgtgcgtcatgcctcagctgaagcgacaggagctacctgatcactgagggaagcctgccggcacactactgggtgggatgaactttagaacaggttgcgtgtgatgataacccaatggtcgactgttttaattcgaaggaccatgggtgccgtcaccgaagacatgctggccccaaaccgggatgacctgggagaaacggacagggaccactgaacagataatcgactgcaatatggaatccactgccagctgacgtgatgagcggtgatgagtgcacaacttcgataagcacattttcatcaccgccaacgccctaaggaatgtcatcgataactatcaggagcagactctggactcttatacaatgttcctgaaca

SEQ ID NO: 5443 - DNA, 231 bp, Bos taurus
  Clone ID: 45-LIB34-051-Q1-E1-D2
gctggtctttggcaaacgtcaacactttgggtaaaggtcccgtgcttctggactgcattggaggtctgaatgtggccaggatcgatctatagctgacggaacactgctctgatggcagtggctttgtggctaacatcctgcatgaacatgacattatggtgtttttaaaaagggactttgtcttgaagggtcatgcgtgtgcactgcagttaatatcagagaggttgtagg

SEQ ID NO: 5444 - DNA, 243 bp, Bos taurus
  Clone ID: 45-LIB34-054-Q1-E1-D2
ggggcaagcctggctgccagaattcactggaggccatgagtggaaggcagagagccccagtccccaaaatacggtggtgatgaattctggaaggcaatgcagaggttcgcctgagtcttgacagcagaaccaaaaagcattttccagttttctattgaaaatgcttggctctctggttttaatcccatcctttgttgttgaagttttccagactgttgaaccagaaggaagaaagatctgaca

SEQ ID NO: 5445 - DNA, 196 bp, Bos taurus
  Clone ID: 45-LIB34-055-Q1-E1-D2
agtctagatcgcgagcggccgccctttttttttttttttgtggttgacagactttattgttaaatcacagaaattctagtgcaaaacaaaccaaaaaatcattaagttcatttaatagcaaccgcatgtcttgctctcgcctggcaaccggaagtggaacattcgcaggcaaacaggagataagaaggcagggcgg

SEQ ID NO: 5446 - DNA, 241 bp, Bos taurus
  Clone ID: 45-LIB34-060-Q1-E1-D2
atccagccctagcccccaacccttacgaaaacatcccttctccgggtcctctgctcaaccactaagaggactctggttcgacttgcccaccgcctgccacccgatcccactgcctcagcctctgctataccgtcccccgcttccccgcccactggccaccgctgcacacacctttcccagttgcaggagggaccagccgccagcctgtcgcccagatgtgccctgtaggtgggtgaggata

SEQ ID NO: 5447 - DNA, 238 bp, Bos taurus
  Clone ID: 45-LIB34-067-Q1-E1-D2
gttctagatcgcgagcggccgcccttttttttttttttttcattattatagattttaatgtccttcatctactccaacctacagtatagtgaatttgagagcgccaaagttgcctggccacctgtcggctgtgaccacccggctacgaccaaacagcctgaacgccacctgtacaaatccggaacggagggcggagaaggtacagcaccaccactctgcactcatttcctacgagttc

SEQ ID NO: 5448 - DNA, 219 bp, Bos taurus
  Clone ID: 45-LIB34-072-Q1-E1-D2
aattctcgagtcgtcccaggtctacacacgcgtcagagatgatgtccgagagattatacagtatgatttagatttcggtatgtgtgaagacgtgactcgcatgatagtgtgtatatttcttggactagtttgcttcgtatgagtgtactagagttagtaaaggatgacgagactcgtgtaaaaattgaaagatgggatgaatcactagaggatggatgc

SEQ ID NO: 5449 - DNA, 411 bp, Bos taurus
  Clone ID: 45-LIB34-078-Q1-E1-D2
gagaagtcaatttacaagtcgtccccactgtttggaatctattactcggtggaaaaaattgggagcctgaaagttggtgaccccgtgtaccagatggtgcagtgacggaggcaccagatttcagcatctgagagggattgatgagcacttttatgaccgcagcagcaccactatctgggcaaatccttagtacccagctggtaatttcatcctggaaatgaacctctttttggagttacaaatgttctgagttaatacaaggaaagtattaatggtgatttgggaataagaacgcatatagattttaggtaatgaagacttttaaaataaatacaattgtccaaaatattatttggaatgtgatggtagctattacacttcgtcagtctctgacgttaatactgatgagta

SEQ ID NO: 5450 - DNA, 443 bp, Bos taurus
  Clone ID: 45-LIB34-081-Q1-E1-D10
gacccacgcgtccacggacgcgtgggtaaaaatgtaggttttatttttgttttgaattcactttgctgttcctctcttttactttaaaaaaacagaggtgggagtgatgttgtcacgttcagaggtctaagcgtcactgatccattgggtggatagccaactgtgacaaagaagaatttgtagactacataggccttggtctggggtggagtttgctctgatccccctgaaagtttttaaaacctgaaactagtcagctttgactacagcataaaaacacactgctaattgttttttaagccacaatgttaaagtataacttttagattattgtaacccataaaagataagcatacatgtattaggcttctaagtctattactgaaaattatgcaaataatggaacaaaatgactgttctaaatagtttttttagttataact

SEQ ID NO: 5451 - DNA, 405 bp, Bos taurus
  Clone ID: 45-LIB34-082-Q1-E1-D2
gaggcggctgcttttgcggtcccgcggggagttcagctgcgggtgctcactgagccgctgctgccaagaagggtccgggagctcctccggccgccactttcaaggagcacccccggctcggagcgcgacttcagcctgtctcacagtcggggcacagtcattgtagagcgctggtggaaggtgccgctagcgggagaaggccggaaaccgcgcctgcaccggcgacaccgcgtctacaagctcgtggaagatacgaaacacaggcccaaagaaaacctggagctcatcctcacccagtcggtggacgaacttggagtccgaggtgacctggtctcagtgaaaaagtctgtgggccgtaatcgactacttcctgaaggactggctgtgtatgcatctcctgaaaac

SEQ ID NO: 5452 - DNA, 377 bp, Bos taurus
  Clone ID: 45-LIB34-083-Q1-E1-D2
agcaaatactgtagcattagcttttcatacttcatatgacaataagaaccgctgtgcctggctggacaacttaacctcagagacgatgtggtgaaaattacaatcgattgggacaagctccagagcctctcggcactccagcccgcttttctctttagtgcacttgagcaacacgttttatatttacagccttttttagcaaaacttcagcctctgattaaagaggagaatacaactgttgctgaagaaataggaaaaacagaaacagggaacaagaatgaagtaaatgccaactttcccattggagacctggaagaggaagaaaagcacaaagacagtgatttaggagatgtgaaaaagacacaggtccattttga

SEQ ID NO: 5453 - DNA, 362 bp, Bos taurus
  Clone ID: 45-LIB34-086-Q1-E1-D10
ggcagggaagatgtgtctaaggagctcagcttggaggactgactcagtaggaagtgggaggctgaggccgggctgtgagggaaggtcctgcctgggcaggtgaagcctggtaataagatcagattacataatgggttttttgcaaggctggttggctgtgagtcggctcagcactcggcattcaagtcttccctcccaaatccaccacctggaatccaccgccatcccctgggcctggcccacgacgttgacagcagctcggagcgcccacctctctcatggcacagaaagggtgactactcggcttgttgccgcgggttccacgggacggtgaggggccgggtcaggcttctgtgctccac

SEQ ID NO: 5454 - DNA, 424 bp, Bos taurus
  unsure (304),(309): unsure at all n locations; Clone ID: 45-LIB34-086-Q1-E1-D2
cacgcgtcgcatagtacttcataataaagtgtaataaattccggtggaaccaaattataatcagcaaatttgtaagggttaacgggttacaattagtccttaagtccgttagcccaattagtttaaattgcagtttgagaaatgaattaccttatatctctccgttaggttcgttaaggtaatttcattttaaaaaccattcattagtcttagtctgaaaacaagctgtaggttgtttggctcagctttaatatctttttgggagctgtcagtgtataagatgtcaagggctgggtagtgttanggtanggtgtgatggataccgccattttgagaaatttctgggcttcctgttatgaaatcctaaagagtctaatcttaagaacatagtgccccaaaaggttgatgcttctttgacgacctt

SEQ ID NO: 5455 - DNA, 116 bp, Bos taurus
  Clone ID: 46-LIB34-002-Q1-E1-D6
acccacgcgtaccaaacgacttgaagccaatgtagttgaacctttgacagcttatggaaccattgtaaaaattaagccagatgatcgcaaagcaacatgaacagcattcgaatcca

SEQ ID NO: 5456 - DNA, 182 bp, Bos taurus
  Clone ID: 46-LIB34-004-Q1-E1-D10
aattgtcacggcatgtgaatttcgtacatgtagatcaatgaatacgcgtgaatactttgctatgattaatctgcagatcaccaaggaaagatttcgagaactaggtgccattcattgaattatactatcatctatgcttggcagctaaaactcactgggtttgggcaatgcatggtatgatc

SEQ ID NO: 5457 - DNA, 367 bp, Bos taurus
  Clone ID: 46-LIB34-007-Q1-E1-D10
gagaacgaattacatctctgtaatgtgttggcagaggagatcagagatcactgatgcacacagaggcattctcagggttgccgtattgatgtgtccaaaactgagttcatgactgcttcttactccaacacctcttctatttccattgtttcctttccccatgaacatcaccatccactgattagtgccacctacctcccttcatgtcacctccacagtccaatctgtcaccaagctaaatcaatttccatcatgacattcctacaagcaacaccatcatcttcacctgtcactgtgctaactggtgggccagtcctccacttggtgcctctttgatcggatttatctcgtcccagcagtgaatgct

SEQ ID NO: 5458 - DNA, 127 bp, Bos taurus
  Clone ID: 46-LIB34-009-Q1-E1-D6
ggtccacccacgagtccgactgctgggagaggtcgctcggcgatgatgctgcgaggaggctgccagcgcgtcggggcgcagctgagggggttgcgcctcgggcccctgggcctcgtctacggcggcc

SEQ ID NO: 5459 - DNA, 404 bp, Bos taurus
  Clone ID: 46-LIB34-010-Q1-E2-D6
cacagaaattcacagagttgggtagagtagagaggggttagggaggagacacaggcgacctggtggagaaaaaggagggtccaaagggagagagagcagtcaagccagtaatctcactccctagtgaaaaatgggtcctgaagattgggtccttaaaggtacaaaattggtaacaaatacataaaagcaaaaattaagaatctagagtagagtttggaatttcaaaaatacgatgttaaagaaaagaagaaggaaaagaaagagagaaagaacgaacaaacgaaaacaaacaaggtcgcaaaaattataaagaaagtacaggtacaaaattgataactaataccagagagcgaaaattaagaatctagagtagagtttggaatttcaaaaatacaatgttaaag

SEQ ID NO: 5460 - DNA, 194 bp, Bos taurus
  Clone ID: 46-LIB34-017-Q1-E1-D10
cagcacagccatactggtggcactgggctctgttgtggctgtcctctggcacaggcgccgtcctggcattgtcctactgtgggactttgtctttctcaactgttgtgattgcctcagataggggtatttacagaacttatcaggaaggagcctgtgccttcctgtgataggcaatgtcttccaactcaacttgg

SEQ ID NO: 5461 - DNA, 139 bp, Bos taurus
  Clone ID: 46-LIB34-022-Q1-E1-D10
gacaagtggtgccgaaatagggacccgaaagtaaatccagcctgagaagctagttcctagccgaggtgaacgtagggaaatctggccagctaggcggaagaagaaagtacttggctctggctcaattttttccgcgctg

SEQ ID NO: 5462 - DNA, 241 bp, Bos taurus
  Clone ID: 46-LIB34-024-Q1-E1-D10
ggcttttaagattaatttggatgacacaacatccttttaaggtaagaatatatcaattccaaggtctctgaagcattaagaaactatgacaatgggctctagggggaacagggctttaacatagatctaaagattataagctggaagattcaaacaacatgccttgagattttaacgtaaatagtttgacgttcccagttcccgtaaatactaatccctgttcgcatgaatatcctgttcc

SEQ ID NO: 5463 - DNA, 301 bp, Bos taurus
  Clone ID: 46-LIB34-028-Q1-E1-D10
aagttggagagatacatatgggatgatccttggttctccaggttagcaattttgggatgtgagaaccacatataaatgtatcacgtgaaccagagtacagctctgagggagatggtcctcatgcagaagcagatactatctcaaggatgcgttgaattctgtaaacttgaagcatggtgtagagagagcttaaacattgttccatctcacaaagtttctcaagtctaacagttctacaagcctgatgtagatgctgaaagttggagatgtaactcatccagaatgtatactgataagatta

SEQ ID NO: 5464 - DNA, 410 bp, Bos taurus
  Clone ID: 46-LIB34-032-Q1-E1-D10
cggacgcgtgggcggccagtctccccagggaagctccactcggggccaggctgccatggacgccctggtccgactcctgcagctgctggtgtttctcctgaccctccccctgcacctcatggctctactgggtttctgggagcccctgtgcaagacctatttcccctacctaatggctgtgctgacggtcaagaacaaccgagtgatggagagcaagaaacgggaactcttcagccagataaatgggctggcaggtacctcatggaaggtggccctgctggagctgggctgcggcaccggtgccaacttccgcttctacccagctggctgtaagattacctgcctggacgccaatcctcacttcgagaagttcctgacaaagagcatggccgagaacacgcatctcgagt

SEQ ID NO: 5465 - DNA, 352 bp, Bos taurus
  Clone ID: 46-LIB34-032-Q1-E1-D6
gaaatgtaccactgtgatataactcaagctgcatcgtagtactttagcatgttgtaagaaaagacctctatataataacccaactttaagcagtcctctttccccacacacagcctaagcatttatctgtcatacaactgcatgattacaaagcgttagttctgtatatcgatgctatttgttaatgatggaaaccacattattttgttgctgtgtcgtttgtctctagcagttgagacaattactatgactagtatatcattggatttgagggttgccattgtcaaaatcaattttcctgtagtactgtatttgcattaattattacaaaatgaaacactcgttacatgca

SEQ ID NO: 5466 - DNA, 51 bp, Bos taurus
  Clone ID: 46-LIB34-034-Q1-E1-D6
aacgggatatagaggatggaatgctgagcaaactctgccacaatgatatat

SEQ ID NO: 5467 - DNA, 392 bp, Bos taurus
  Clone ID: 46-LIB34-036-Q1-E1-D10
gaaaatctacagctggtaaaccatgaagcaaattccatggcagtggatgttgttcctcacgttgacaacccaacctttgaagaagatgaaagtcctgatcaggaaacaatggtccagaaattaaatcataaaatccgtatcaattgaaaaactgaacctttaataataacaaaactggcaatcaagggccaatttacaacaaagggaatgggtaaacctttaataatatgaaagagactgaaaatgctgatatgactaatattatgctatagttaaatgacttaaaatactaaacctattaaccttttccacaaacacattataaagtttttcataggcaaatttcctcttgagaacagtagcaacatttttaaatattcaaaactcttgtc

SEQ ID NO: 5468 - DNA, 379 bp, Bos taurus
  unsure (355): Clone ID: 46-LIB34-038-Q1-E1-D10
ggcccaagtgacagaggggaggcttccttgttccccagagcccggaaccctgcagggccattcaggaacaagaacggtcctggcaaaattttgtcccagagagtcccgcctttccagaccaagcctccaagctctccgtctttcctcatcggccggcctgatgctgagcgtccaatgggaccccagccaaggctcggggtggcagtggcactgaagtagagcccccttaccactcatttggactgtgatatgaatgcaaaataaaccttcactgggttaagccactgatttggaggccacttgttaccgtcacgcctattagcatctcctggaaactcggagaaggcaggactantcactctaccgcaacagctacacc

SEQ ID NO: 5469 - DNA, 111 bp, Bos taurus
  Clone ID: 46-LIB34-044-Q1-E1-D10
ctcgtcgttcgacgcaactcactatagtgagtcgtattatacagtcccggatcctaggacatgccctgatatatgtcgtacttataactcctgatgcctgtcctgttctac

SEQ ID NO: 5470 - DNA, 354 bp, Bos taurus
  Clone ID: 46-LIB34-045-Q1-E1-D6
gatggtgttcgtcccttgatcccatctttactcagaattcttgtgtcccatttcgcattcttcacatatcggacttacagaaaccctgcttgtcaagccagtcctgagatgaagctgttacccgacaggaggaggaaaacacaaccccttgtaaccgtcaacattcaagaaaagcaggggaccaactgaagcatggtcattacagtagggagacaattcaagcatccaatgtcagtctgtaaagactggaataacgagatatacaatacacagaaggttcaccatcacaaaggctagcaatcgacaaggatgatagtaaactggatggaatcactcaacttcctagcatgcgat

SEQ ID NO: 5471 - DNA, 434 bp, Bos taurus
  Clone ID: 46-LIB34-049-Q1-E1-D6
ggaggaccagattatgaggaaggcccaaacagtttgattaatgaagaggagttctttgatgctgttgaagctgctcttgacagacaagataaaatagaagaacagtcgcagagtgaaaaggtcaggttacattggtctacttcaatgccatctggagatgccttttcttctgtggggactcatagatttgtccaaaagccctatagtcgctcttcctccatgtcttccattgatctagtcagtgcctctgacggtgttcacagattcagctcccaggttgaagagatggtgcagaaccacatgacctattcattgcaggatgtaggtggggacgccaactggcagttggttgtagaagaaggggagatgaaggtatatagaagagaagtagaagaaaatgggattgttctggattctttgaaagctacccatgc

SEQ ID NO: 5472 - DNA, 84 bp, Bos taurus
  Clone ID: 46-LIB34-062-Q1-E1-D6
ggaagggctggaatggcttggtaatatagtggcttaaggacgcacatcccttaatccagacctgagagcccaagtcatcatcaa

SEQ ID NO: 5473 - DNA, 99 bp, Bos taurus
  Clone ID: 46-LIB34-063-Q1-E1-D6
tgggccttggggtgggtggccatggcttttacgttgtaccccctgctgcaggcggcccttcccggcgtcaatgcaatcgccgtgcttcacaaggagcgt

SEQ ID NO: 5474 - DNA, 59 bp, Bos taurus
  Clone ID: 46-LIB34-064-Q1-E1-D6
cgggtcgacccagcgtcgacgtaacatgacgacatgatcttacatattcttgacccttt

SEQ ID NO: 5475 - DNA, 204 bp, Bos taurus
  Clone ID: 46-LIB34-065-Q1-E1-D6
ctgacccaggaactgaacctgcatctcccaagattcctgcattagcaggtgtattctttaccactgagtcacctggcatgccctgataaccatgatgatgccaatataaaaacctaataaagttcaaacatcagatttattatttttgtcaaaatataaaccttgaaagtcagggactgtgtcttagtcatagaggcttcccag

SEQ ID NO: 5476 - DNA, 398 bp, Bos taurus
  Clone ID: 46-LIB34-074-Q1-E1-D6
gtggttccgggtggcgggaggctgaggggcgaggggtcgctcgagcgcgccagcctcgccagggctcggcgcagccatggagagcggagggcggccctcgctgggccagttcattctcctgggcaccagctctgtggtcacagccttcctgtattccgtgtaccggcagaaggcccaggtcgcccaggagctcaagggagctaaaagaatccacttgggtgaagacttaaagagtattctttcagaagctccaggaaagtgtgtgccttatgctgttattgaaggagctgttcgatctgttaaagaaacgcttaacagccagtttgtggaaaattgcaagggggtgattcagcggctgacgcttcaggagcacaagatggtttggaaccggacaaccc

SEQ ID NO: 5477 - DNA, 465 bp, Bos taurus
  unsure (333): Clone ID: 46-LIB34-078-Q1-E1-D6
caactctatatatagagtcgtacatactttgtgttgcagctcgtggggagtcgcgattaaggagcacctccagggctttcccttccctagagggctgggccctatgatcctggtctgggcctacacccatttccttctcaagtaatacgcccatttttctttctgtcccgggatgggcagcttctctcgctgtggatgtataggtacctggtggggctggaggaactagggactaactcttgcccttagtggacagagctgggccaaagatgtgtgttttccctccaccccactacagggcaccaaagccttaacagctggggttggagtcangtggggtgaaaagagcctgttctgtagctaaaagggaacatgagaaagagaaaggacttcctggtgataaagtttcccctcccactcccgccaggggcttctgggcttgacagctgcaacatttttcctctc

SEQ ID NO: 5478 - DNA, 378 bp, Bos taurus
  Clone ID: 46-LIB34-083-Q1-E1-D10
cccggctcgaccaacgcgtcagttttttttttttttttttttttttttttttttttttttttttttttgaaggagaaatgagagctttattattagcccctagaacatttttcagcgttaaggcaaaaagtaaaatgactgggtaaggaaggcctgaagaaggacctataaaggcccccagggctcaaccagggcacagcagaggcttctcttcagatcaacggtgtgcagtaggtaggcagggaaggaggctgtgttccaactgagatagaccaaccactcagcccaaagggaagcagaattgtgtgaggccagcagggttagaacttgctagcatagagggtcatgacccatttgggcacccggagaaacccaggc

SEQ ID NO: 5479 - DNA, 435 bp, Bos taurus
  unsure (394): Clone ID: 47-LIB34-001-Q1-E1-D4
ctcaactgctgatggtaccaacgttgtgaagctcttcagtgatgcgatccgactagctgtgtcttacaaacagaactcccgggacttcatggatgaggtgttgcaggagctcgagaacatcgacttgaagcgggaggaggaggaggaggaggagatgctggacaaggagcagccgggccgccagcagagcccgtctccctcgtgagcacaggaggactcttcacggcccacctccctcggcagtgcttcagctctcaggggaggcactctcccaggccgtccctgccacaccgcctacaaactcagctgccccattggcacccccaccctgacttccgtgccccgggaaagctgacccttcagtacacgccagtaacaggcgtaagggccatancagaccctgaagccaaatgagggacggaacctacagggcat

SEQ ID NO: 5480 - DNA, 243 bp, Bos taurus
  Clone ID: 47-LIB34-002-Q1-E1-D12
cggtcagcatcgggccgaccacgcgtcaagtatttcacgttatgttcaatttaaaattgaagtaaactattgccaaaattatgattgcaacttcaagtacgaaattctaaatttcaatttttcccaatgaaatttaacattttcaacgctcatagcaacaatacacacacagcaattaagtcaaagataaataaaaacttgcaaacagctgactataaaaaagaataaatacaaaaaggaaaa

SEQ ID NO: 5481 - DNA, 415 bp, Bos taurus
  Clone ID: 47-LIB34-009-Q1-E1-D4
gaggagctttagagatcaatttggtaataaactccagatctagtaacgttttcctcattttgctggtacagagcattttagaaacattcaccaccagtctgaaaggtgatgtttatgttcatacattttaaacagcatattaaagttaaatcagttaactataaacattttaaatttctaaatatcataaaaattttattattaaaatagatttaaataatcaagctacaatatttaaggtgatatcttattactttgtactgcatcaagtcaagtgaccttcttagtctaagaagcatggccatcaccattggtgctaattgatttaaatctgaattgctggtaacagctgtttttctcacccttaaatgaaattgttacagttgataagttatctttgccgtaaatgttaaca

SEQ ID NO: 5482 - DNA, 393 bp, Bos taurus
  Clone ID: 47-LIB34-015-Q1-E1-D12
ggatattcattttgaagcagtgattggccacaaaatcaaaatgaaatgaataaatgagctccaggccgagatgtatgcaccttaatgatgtggaactgaatttagagtcaatgcttcaaagctctatttcacatttttcaaagctgttaatattaaaaaacattggtttggcattagcaatggtagaatgaacaagactaatcacctgtctttctatttctcaagattatacatgcagttttaatagatccatttttcatctatgcctcttaaaaacttgtatgcttacgtaaacatacttaagaggttatttttctttaacagatttcatttcttttcttttcagttaaaggtggacaaagctacctccctgagagtaaattcaaaaagaac

SEQ ID NO: 5483 - DNA, 308 bp, Bos taurus
  Clone ID: 47-LIB34-016-Q1-E1-D4
acagctttgagcttcaaaaatgaaagctaatgcagagatgctaggctggctacttaatactgtactgtggatctgagagatgggaggaaaaacagagttgttgttttttttatatatagataatatagaaaaaaaatctgacttcaagtacatcaatgataatctaattttctctgtttttcactaatgctgtacactgctttggcttagactatcctcctgttttatccgaagtgaaagtagatgactaaatgcaaatcattaatataaatcatattttaccaacacatgattctctctcacaaaga

SEQ ID NO: 5484 - DNA, 130 bp, Bos taurus
  Clone ID: 47-LIB34-019-Q1-E1-D3
acgcgtcggcattctgaaacgctaataagatgcaggtcccctggaaggaattgttcagcgaactgggggtccaagatttcccttctccaaaaaggcgcctggccgaattccccttggagtttgggcaaga

SEQ ID NO: 5485 - DNA, 432 bp, Bos taurus
  Clone ID: 47-LIB34-025-Q1-E1-D4
cgggtcgacccagccgtctagctcctctctctttacgtgggtcaaaggacaagagactcactgtgggattgtgtgcggtggggaagggtggctagctctgctgatggagaaactgtatagagcaaaggaaggctcttaccgactcttgaaatgttggcagactgtgcagggaggacctgaggtcaccggcaggcttgaagctttattaggtaaggctcagaaggtctcttgtggggaacactgccatacatggttgcgtaactgtcaaagagtgtagtccataaaatagactctcaccctcttccctaacagtgggatcttctgaccttgcctagattgtttcagggaccccactggttcataaagcggggtgccctcttgcgttgctctgcacggggtggatgcccagtacgttgtgccagccgcctggta

SEQ ID NO: 5486 - DNA, 410 bp, Bos taurus
  Clone ID: 47-LIB34-026-Q1-E1-D12
ggcaagttgaagaagctgtctgtttgaagagtggcctgcctgaaacaggatgtgatgacaagttagagaaaaggtggcacagtgaggacttttatgcttcaaaaatggggaaaatagaacattttgagggcagggaagtagtagagaggaacaagggttagaacttaggataaggatagatttaccttgaagatctgaaaatgcagggagaatgaaagaggaaacttgagagcatgggagaaggtccgggatgaggtccagctgagtaagcaggaggtgttcacacaccctcttcagtgctgaggctgactcatgtctgatttgaggcagtatacagagtagttaaaaccaggtgggctgaacatgtaaatcctggttacgctaggagcaccttggacaagttgcctgaa

SEQ ID NO: 5487 - DNA, 432 bp, Bos taurus
  Clone ID: 47-LIB34-035-Q1-E1-D4
cccacgcgtccgtacagcaactgatggatagtacatttatattctttaacctagtaatacgaaatttatagtgatatgttacaccagcaatataacactcacacgcattccatctcagcctcctaatgacagctatgccttttccagtgaacatctacacgcattaggacatagacttttcctggatactcagatgagtataatggctcacttactcagttaatggcagatttgtcagctagcagcagagacatccttaatcataatggtgtacacaaaatatgtgcctatttctgttcacgcagatggcagccagttcaaaactgacatggtggctctacagtatcagtaagggtcatctcgtcctgctcatcctgcagtgttacgccctttgttcaaagtagaaccctgttctgaacatgactaccttct

SEQ ID NO: 5488 - DNA, 428 bp, Bos taurus
  Clone ID: 47-LIB34-047-Q1-E1-D12
aattaatagaacttttcactttaatgcagcatgaacagaaaagttaatatgtgctcagcagatagagtgtttgcaaaacattcactatggagcatccacttcatcctgaggatgcattacggattgggtaacaaagcacagtctctccctcaaggactgttttgttttcatggaaaaattcagacattacataaacagagaggatgatataatgtcacgtacatatcagcagcttcagtcattatcaacatggggccaatataattattccctacgtcctaacccctttcctcttttgggtttgttttgtagcaaatcttacacatcctgttattttaactctaagaatttttaaaaatacttaaaatggcatatcacacttaaaataaacataattctttaatataaccaatatcaagtattactcc

SEQ ID NO: 5489 - DNA, 363 bp, Bos taurus
  Clone ID: 47-LIB34-056-Q1-E1-D4
aattttctttattttttgaagaaagtaaggatttgactgaaagttcaagtgacactgtggaaatctgcaacaggaggggatgtcatgaaggcagcttttctttttctgaggaaaaaaataggcatgggctacaggactatttaaaatgtctcatttacagtataagctcaaaggtagatgtaatttttacacctatgagtatttgtccaatttctgtctctccttcaccattgggtatctattctttatatgtaaataagataaggtaatggatagccttattcaatcttcatcattttcattcatcaaagattgttcctatgtagattattggacatttattgtagcactacataactgatt

SEQ ID NO: 5490 - DNA, 250 bp, Bos taurus
  Clone ID: 47-LIB34-058-Q1-E1-D4
cgcgttgttcgatacaacaccctagagtgagtcgtatgtagaaataaatcaagctgcatcgtattactttagttgttttaagaaaaaacctctataaaataacccaactttaagcagtcctctttccccacacacaacctaagcatttatctgtcatagaactgcatgattacaaagctttatttctgtatacagatgctatttgttaatgatggaaaccaaattattttgttgctgtgtcttttgtctc

SEQ ID NO: 5491 - DNA, 241 bp, Bos taurus
  Clone ID: 47-LIB34-060-Q1-E1-D4
gggagggtggaagggctcctttctacctccagggccccgagcctccagcctgtctacccctgcgtgccccatgtgggaggtgctgggtccagacgagtatcctgccaactctgaccgatggatgtatggatgctgggggaggcgtctagagtcaggtttgatggctcgcccagcagccgcctcctctgagatccctccctttctccaaagcagatccagccagataaacccttcccatcct

SEQ ID NO: 5492 - DNA, 225 bp, Bos taurus
  Clone ID: 47-LIB34-066-Q1-E1-D12
cccggctcgacccacacgtacggcgacgaccagaatgggagctgactgatatggtggtgtgggtgactggagcatcaagtgggattggagaggaactggcttaccagctgtccaaactaggagtttctcttgtgctgtcagccagaagaatgcatgagttggaaagggtgaaaagaaagtgccttgagaatggtaatttgaaagaaaaagatatactcattttgc

SEQ ID NO: 5493 - DNA, 197 bp, Bos taurus
  Clone ID: 47-LIB34-068-Q1-E1-D12
cgggtttgctcctagttgtggtcccttctgagtggactccaggtggactgtggctggcccctggagggtcaggggaccatcctcttgttccctcttgtcattcctccaacctcctccaattattgttgttgttgtttttgtaaagtggatgccttactttttggataaatatttttgaagctggtatttctatttct

SEQ ID NO: 5494 - DNA, 270 bp, Bos taurus
  unsure (223): Clone ID: 47-LIB34-070-Q1-E1-D12
gaattacggcgtcgagccacgcgtaacggtctgcgggtgctcaagccctggagtccggagacggtggagacaacctactatgggcaggtgctgaagaaatcagcagacttccagaccaatgcctgtgtcactgcagccaggccagtccctcagcacatccgggaagccctgcagaatgtacacgaggaagtatccttgaggtattatggctgtggtctggtcnatccctgagtgtctggaaaactgggctggattttggacctggggtag

SEQ ID NO: 5495 - DNA, 96 bp, Bos taurus
  unsure (17),(30): unsure at all n locations; Clone ID: 47-LIB34-070-Q1-E1-D4
ccggaaagttcccgggntcgacccacacgntccgggacaccgaggactaaggggtttcgtccgtgcttccggtttcccctctgtaatgcgtgcctg

SEQ ID NO: 5496 - DNA, 424 bp, Bos taurus
  Clone ID: 47-LIB34-072-Q1-E1-D12
gggccgacccacgcgtccacttaccggaagctgcctccgaggccagcgcaaccaaagaggcggcggcgtcgagctaatgacggccggggccctgggctccagccgccttcagagcccagatgaacctctccaagaaagtgtcttttccctccgttgttctgtgcactgtaatgtacaaaataagttattgtgctgatcgggggtcttggccccttgccgtatttacactgaaagatggggttgtgtgtatgtgtgtctcacatgaacctgtcggtgaatgtagctgccacttttgagttcacagattgtcctgaattttgccacttggaaataacgtgctgaatcatctcagcaaccagaagtctctgtcggggaaggactcttgtgaatgaaccgaattggtttgaacccttggggtcccttt

SEQ ID NO: 5497 - DNA, 375 bp, Bos taurus
  unsure (20): Clone ID: 47-LIB34-077-Q1-E1-D12
ttatttctaacagagctcanactttgggttgtcaatgaacctaattaagggcatgatcttcaccctctttgaaaccgtgggtcacctgtgacaccatctggagaatgaaatatactcaggcggggcttcctggatgattctttcaaagacaaatcctcaagtgacttgtttctttggatttttatcctttgccctctactcttcccttctcacccatcaccgctcccccactcccacacctaggaagatgcaatgcctgtggctgaagcagcagttttgcaaacctgagaacaaaagacatgtattgctaagcagactgaaggagtaggaaacagatcaggtaatgtccttgcacagacacaccagacttacaga

SEQ ID NO: 5498 - DNA, 431 bp, Bos taurus
  Clone ID: 47-LIB34-078-Q1-E1-D4
gtattatgttataatccgtgttggcactggattctaagtggttgccatcttgaatcctttgtaataaagccatattttttgcgaatgatgccctgatattgagtattcaaatactcgatcaagtgcctgttaaaaaaattgctacattgttgttggtacttgcagtctaaaatgactattcgcattaagagtcactgatcacagattattctgtcttgcaagtccttcaggccttttcatttttacctctggcttattttaaagatttttcttttttaatctactttcaaaggtgttatgtttttaagcaagaaatagtgcactgatctggtaatttaccttttttaattaaatgtagttaaagtaacatagcagaactttaaaaatatctattttgtcattgtttttcctttgcatctagtcccattgaa

SEQ ID NO: 5499 - DNA, 310 bp, Bos taurus
  Clone ID: 47-LIB34-079-Q1-E1-D4
cggacacctgggaagcaaggtcattggacaatgaactccttgatcaacaggaaaagctaattccagaacagctgcaccatttgacgtcttcatcaacaacgtacaaggggcccactttctccacagtcgggagacatgtgctgatgagtttcaaatagtattaataccaatacagccctcatgcattgagtaaatgtcgtgcagcggcgttgaattccctgatgatggagaccatgtgcctattgcgtaacaatcccttgcgtcagtggtctgaaataatgtcgattacaggactttttccactttttca

SEQ ID NO: 5500 - DNA, 147 bp, Bos taurus
  Clone ID: 47-LIB34-084-Q1-E1-D12
ggctcggcctgcttcccccccttggtgggcttttgggctaaccgtcctgccggctgcctgctctcccttgttctgcccgtccggggcgtggtgattgctgtgctcgccttcgggtggtgttgcatctcctctcgcgtcttcctgctg

SEQ ID NO: 5501 - DNA, 410 bp, Bos taurus
  Clone ID: 48-LIB34-006-Q1-E1-D8
gttgtagccattaagtaaaatctttcacatgccttccctgaatgccttttttggactgagtccaccttgaataaaactaaagaaagtaaaaagagcagtacagggtgactttgttctcacagtgacagatggaaaactgaaactatgcacatctataaaagacttcagcacttctagaagtaaggtgtttttttcccccaaaggaggtcaacaattagtttttaaatcaaatggaattatatcttcaaaacatgctgctttacattttctttctcactcttcccactctctactcttttaaataatgaaagagcacagaattttaattttatggagtctctattttataaatcttaagtgaggattctacctaaaggcttgccatttatacaagttgggttgtaaaccat

SEQ ID NO: 5502 - DNA, 384 bp, Bos taurus
  Clone ID: 48-LIB34-015-Q1-E1-D8
ggatattcattttgaagcagtgattggccacaaaatcaaaatgaaatgaataaatgagctccaggccgagatgtatgcaccttaatgatgtggaactgaatttagagtcaatgcttcaaagctctatttcacatttttcaaagctgttaatattaaaaaacattggtttggcattagcaatggtagaatgaacaagactaatcacctgtctttctatttctcaagattatacatgcagttttaatagatccatttttcatctatgcctcttaaaaacttgtatgcttacgtaaacatacttaagaggttatttttctttaacagatttcatttcttttcttttcatttaaaggtggacaaagctacctccctgagagtaaatac

SEQ ID NO: 5503 - DNA, 394 bp, Bos taurus
  Clone ID: 48-LIB34-016-Q1-E1-D12
cccacgcgtccgcggacgcgtgggcttgtggatttcagcctcacccagctgcggtccctcaatgtcagctacaacgtcctggagtggttcctagcgtctgggggagaggccgcctttgaactggagaccctggacctctctcacaatcagctgctgttcttccccctcctgccccagtgcagcaagctgcacacgctgctgctgcgggacaacaacatgggcttctacagggacctgtacaacacctcctcaccacaggagatggtggcccagttcctcctggtggatggcaacgtgaccaacatcaccaccgtcaacctctgggaggagttcgcgtccagcgacctctccagtctccgcttcctggatatgagccagagagagttccagtacc

SEQ ID NO: 5504 - DNA, 390 bp, Bos taurus
  Clone ID: 48-LIB34-019-Q1-E1-D12
gaccactctcctcagaagccagattgtccttactgaagaggcagggagggggagaccggcatgtgactctgattttggtatggctccaagaccttctgtgtgtgtgctaaaaccaggggagcacgcacctccagagcccctggtgttttgtagagccgggcgcagagaccaggagcctcagcatgataagaggatgcagtcttcccgtggaaaccttcccctggaaacgtccagggaagccattcgtccccagcccttgatctgattttcactctgaatctgattgaggaagagtggtgccggcagcaagccagtttaccgggtgggatggatctcgctctgctggtctggcctcttcctagaaatctagtctcttgcaggagagaccct

SEQ ID NO: 5505 - DNA, 96 bp, Bos taurus
  Clone ID: 48-LIB34-022-Q1-E1-D8
gtccacccacgcgtacggacaaaatatctgccagtttacactcgcaaactcctgagcgtctccttcctcgtgtcatctaacctgcccagctctgcc

SEQ ID NO: 5506 - DNA, 391 bp, Bos taurus
  Clone ID: 48-LIB34-024-Q1-E1-D8
tattttttttttttttttttttaagtttactaaaatatttctttatttgaataaggtcaatgtcatcttttgaattccagctagcatcaaattaacaatcaggaaagagaggcacacgacgaaatgtcacctaactgaatttagcaatggatagaaaacccttttaaatgttaaaagaatatattaaacaggcaacatacagatctaaaaagttgcaagtggtgagtttacattagatcttataaataaaagaatccccactataatcatttgttcactatctccctgcaatgagcacatggacaggagaaacataatcacatcttaatattcagaactgtcatttacgttctttacaaagactgtgtcccggcgaatcaggcggtcaggc

SEQ ID NO: 5507 - DNA, 408 bp, Bos taurus
  Clone ID: 48-LIB34-033-Q1-E1-D8
taaatttatagcatttggaaattgagaaaacatgtggaaggacaggacaaatatatggcgaatttataaataataggtaaattttggtctgaaaatccctgaggtgtctttaacctgctacactaaatcatacactataacatacttcttatttagtctaggagtagtaaattatttgcaagtcactaataatcctcaaattattttgttggcggtagctggtagttttgtaattacgtgtatctgtttttgccacttcttcctcagatgattaaactaagtcaacagtttattttagaaactataaaaataatatggaaagagatttcaatatttgcttcaccacttgggagtgggtaactgcaactgtgttagcagaaatttgcaaagactgggaatgtaaagtta

SEQ ID NO: 5508 - DNA, 126 bp, Bos taurus
  Clone ID: 48-LIB34-035-Q1-E1-D8
acgacatatttcgtccatccacattatacagctatctggaattagatactaatccactggtgcaaattggtcttaacttgaacaagaattacaggaaaataaaatgtaaaatgtggcaacgtaatg

SEQ ID NO: 5509 - DNA, 150 bp, Bos taurus
  Clone ID: 48-LIB34-040-Q1-E1-D8
gacggagtttggtgccattgccctctccaagaacaccgaacggaagcccacataacccattatacttctggctaaccaccttggtagaacgcttggtgaacaactactgatatctggccatcctctgtcctagcatctggttccatagac

SEQ ID NO: 5510 - DNA, 213 bp, Bos taurus
  Clone ID: 48-LIB34-042-Q1-E1-D8
attcatgtttctcagtttgctatttctgatatctatcatgacgcgatttccatgcatcatatgtctcacgtctagacacatttcagagcagtgtcgaacctcttcagctaatggctactagatcagtatgtctgtgcactgcgatttgtatggttggcctctgcatatactgagtgtgtgtgtgccagtgttgtcaaatgaaaggagttctca

SEQ ID NO: 5511 - DNA, 361 bp, Bos taurus
  Clone ID: 48-LIB34-043-Q1-E1-D8
aggctttctttcagcactcagtaccatcgtgagcagcaaaacaaatcacactttgtagccagatttctgaatggaaaaatgggaaattgaactctctacggacctttttgatttgtgggggagttttggttgtttcttggttatatttcagccaaacatgtttgcttttgattttttttttttttttaggataagtgatatatatatatgttcgccttttaaatgtaaatgtttcaaagtaggcaatttacgtgtttccacacctgacatctgatgcagacctcattctctccccccttccacccaccccctttccctcttttcatactcttgtattggttctaataaatggttgcttttc

SEQ ID NO: 5512 - DNA, 205 bp, Bos taurus
  Clone ID: 48-LIB34-044-Q1-E1-D8
cgcccaggccgggtcagcgccaacgccgtcccctgcccggacctggactcagaggtccctctggacagtcaggcctgcgctcctccgtggtccccgccggccgctgccgtgaagatcacagtgatcggacagagcctgttcggccaggaggtctactgcgcgcctgcgggacgaaggccatgaggtggtgggcgtgttcagcgtg

SEQ ID NO: 5513 - DNA, 403 bp, Bos taurus
  Clone ID: 48-LIB34-049-Q1-E1-D12
tgggatgacaagtctgaacagaacctgagctgtatgagtgcagagtttgtaaatgatttgattgggtaagattaacacttgattctgaggtatttttcaggccatgtgcataaaatctgcctcaaatttctatcataacaggaatgtaaaatgaaaaattctatttgaattctaacagctatggggtgcaaatgtttaggcagtgtatttgaaatgttttgaagtcagggcaccaaaatgaagaaacaaactctttacagttatactataagatacagttagcacccacaaattactggtttttaaacttttgaagtcttatcattagctttaagataatggttttgtaaattggtctccacagtaattttggtattttccatcttcccccatttacaaattt

SEQ ID NO: 5514 - DNA, 218 bp, Bos taurus
  Clone ID: 48-LIB34-051-Q1-E1-D8
gtgcacttaacatggattccgccagcacggcgttttgtggcaacatgaccctgagagcaggaagagctcggaacttcgacctacaatcgggctactggacactgggcagtaccacctggggccgtcctactatacctctacctgtcaagcttccgcaatgtatttcctctgatcttgggctccgctttaccgagttttcatgttacctctcttggcag

SEQ ID NO: 5515 - DNA, 234 bp, Bos taurus
  Clone ID: 48-LIB34-052-Q1-E1-D1
ggataactgccaattgtttcagaccaaattcactagggaattaatctgtaaaactgattaatgtagaaaatataattagacttcatcttaattgttttatgtgcactgtgatggtagaatcagtacagtttaagataactgaattatggataattgtatttgatctcttcactagtattctcaattgagtgaccatacaagtgaaaccattcaaatttagatttggggaatggt

SEQ ID NO: 5516 - DNA, 217 bp, Bos taurus
  Clone ID: 48-LIB34-058-Q1-E1-D12
gattacttcagtacacagtttctgctgaacttcgccattcttggcacgcacaacatcacggtggaatcttctgtgaaagacgccaacggtatcgtgtggaagactggtccccgcactaccatatttgtgaagtccctggaggacccttactcccagcagattcgcctacagcagcagcaggcccagcagccgctacaacagcaacagcagcgaaatg

SEQ ID NO: 5517 - DNA, 206 bp, Bos taurus
  Clone ID: 48-LIB34-059-Q1-E1-D12
catatatataaacaaggagatgcgctcctcctggccagatcattgcaagacggtgatttaaacgaagaatcctgttcttaaaatgagagttcttgattttttataaacatggttgtaacaagctgacttcctaggaatttatttcagttactactagagatgaattttttttttttttaatcctaagaaccaacacaggactggat

SEQ ID NO: 5518 - DNA, 142 bp, Bos taurus
  Clone ID: 48-LIB34-060-Q1-E1-D8
ctagttctagatcgcgagcggccgccctttttttttttttttttttttttttttttttttttttattttttttgttttttttctattttagtatcttgttaatttctatcgtaaggatttatgtgatctgggggaggcgtct

SEQ ID NO: 5519 - DNA, 121 bp, Bos taurus
  Clone ID: 48-LIB34-063-Q1-E1-D12
ttcccgggtcaaccaagccttcgagttaaacaagaaaattacccaaattgtaaattcaaatccccttggaggtttcaaaaacctaaggaaaattggtaacaaggggttgtccaaacccgga

SEQ ID NO: 5520 - DNA, 199 bp, Bos taurus
  Clone ID: 48-LIB34-067-Q1-E1-D12
gctgctcttgggagtatatattcaagtgtgcattaatgttttgaatacttaccctagaagagataagttgggcaagtattttgtgctctgtgtatttttttactgcattggacattgaatatagtaatttgcgttaagatacgcttaaaggctttttgtgaccatgtttccctttgtagcaataaaatgttttttacat

SEQ ID NO: 5521 - DNA, 222 bp, Bos taurus
  Clone ID: 48-LIB34-069-Q1-E1-D12
cagagagaagatcccaggtgaagcttaggcaattaccagagccaactcaaagcggagaattcactggggaagttttcagaaagaaagcatttttctgcctgtgagactggccaggtgtcttcactgtggcccatcccacaggcaactcaaagccaggaaccatcagaggctactggttccctttctcagggctttggggaagggagtctcctctctggttcc

SEQ ID NO: 5522 - DNA, 216 bp, Bos taurus
  Clone ID: 48-LIB34-069-Q1-E1-D8
ggaattctctggagaaaagatcagtaggcagagctctggggaatagagctcaaaggcaaagaaaatgctagttaatagtacattgttaatgttaaattgttacttgaaaagtttctacaatgcttaaaactgctaagtgtggggaaggaataaagcaacgttgttttgctttgctacaacgaaggggaatactgcaagagttaacatgaaacctgg

SEQ ID NO: 5523 - DNA, 191 bp, Bos taurus
  unsure (1)...(2): unsure at all n locations; Clone ID: 48-LIB34-070-Q1-E1-D8
nntccggacctgaattcacatgagcactttaattgcttaagctttgcacaagatattctgtggatattgatttgattgctgccacaaggcaatacatgcaaatggctgcaacctgccccgactgtcagaggtatcctgaggaactaatactatgatgaaaaacagctaagtaatgtctccatacattttgt

SEQ ID NO: 5524 - DNA, 417 bp, Bos taurus
  Clone ID: 48-LIB34-073-Q1-E1-D8
acggacgcgtgggcggacgcgtggggaccttaacacacacccacagatcccagcagacctcagacacccttctttaaacctggcattcatccaagagagtgtaaactttagaacatagaaaacataatccacaattcagctcaggtaattgaaaaagcacagtgaaagactttcctatggaaactgacatttgttttgtctagatacattatagaatcatctccagatttttttcctatcattgaaatattgtgcagttacaataaatatctaataacaagtaaaagctgatatgaaaatatatgaaaatttgtgatatgatttgttgttggtcagtcgctcagttatgtccaactgattgtgaccccatggactgttagacaccaggcttcccggtctttcatcatctcccagagt

SEQ ID NO: 5525 - DNA, 471 bp, Bos taurus
  Clone ID: 48-LIB34-078-Q1-E1-D12
cgccggtcgacacaagccactatgtaaattcatacaatctcactaaacctacagtcagtcctatgaatggtaaaacaggtgtgtttgtccccattaaaagcattaacaatgatactgaaactcatcaacaggctggtacaatggaaagaatccaggaaagcataggatttctgttctgtactctttttttagagatggagcacttaagaggtggattaagcaaaggaagcttaattgtcttatttctagtcaaactttaaactataaaaaccaattgctaagaacattctgcaactaatgacttttgactccaaggatatatattttattaatccaagaaagaaagaccaggtaggctaatatatgacaaggtacagatttaatccatacactatttattattgtatcgcaaattacactttgacagtagatatgtattacctacttcattcttgtaaatactcttgctat

SEQ ID NO: 5526 - DNA, 406 bp, Bos taurus
  unsure (33): Clone ID: 49-LIB34-006-Q1-E1-E2
ctgactctgatctcaacattttggctgaagtangtgatgccttgtaatatggccgtactgtctacagtgttttggaaatctaaaaattgtctctccccacccccctcatctctttatttaaaaaataaaactgatatagattaaggtccaaaataatgttgtgggtcatggtgggcttggtactagaaccaaagtaatccatctcagagcctagtatttttcaagagttatggcaaaaattcggaactataaattcgatcatttattaagagcttagtatgtgccaggcacaaaaatgctttacatgtattcactcttaattgttacagcaactataaggtaagtactgttatactcattttatggagagagaagtgttggtacagagttgttgggtaatttgccc

SEQ ID NO: 5527 - DNA, 421 bp, Bos taurus
  Clone ID: 49-LIB34-008-Q1-E1-E2
caaagaagtaatttgtccagtggaatgggaaggtggcagactcaagaacttggatatgaagtgcctagaacaacaaaactcagctgtgtgcctgtccctgtgggtgtgtgtgcttgtgtgtgtgatgctgagtctcttgcacacacacttggttagacacttgtgcatgaaatcattctcatcaaagaaatgagcatacaaagcctttatctcgatgagtccctaagctgcaattatttggactttgaggggaaaaattcaatttttaaactttttaaaaaacttttaaagcaaactttttttgtaccttacttatatccatctctaatccctggacattctgtattccaactgtttgtgatgctgacaaagtgaagttcatcttatgggaccttcatgcaatgtaagctacgtttggtag

SEQ ID NO: 5528 - DNA, 420 bp, Bos taurus
  Clone ID: 49-LIB34-010-Q1-E2-E10
gttgaaaattgttttctgtaattgatattggcagtctgttgctgattttctgtggtcacagcattctttactagcctctcatggagtctatctttttaaatcacagtttttgtttgtttcttttctctttatgataaaagcatccatgtgtatgtggcgaatgtaaatcagagaatcattatgtaaggccactgaaaaatgagcatctgtgagtgcctccatgctgatgtttgtttttaagttgagaacagtgtactttgaagaggctgtagtgatttaaactttgtgagaagctgcctgatgggattgccttgccatctacccacctctctgtacagctctcattcattcctgcacccactgagcttcttatgaaagtgactataccaagtggctgtgcaagttatgcttttcatcgct

SEQ ID NO: 5529 - DNA, 123 bp, Bos taurus
  Clone ID: 49-LIB34-010-Q1-E2-E2
aggagatcacccactttgcgacacctggagagtgggagcagcttgttcgacgaggacttccgtgctgacgtgcgactcttcacgtttgaaggtcacgacagcagtcccatctgtccatctcct

SEQ ID NO: 5530 - DNA, 365 bp, Bos taurus
  Clone ID: 49-LIB34-011-Q1-E1-E2
aggacgcgtgggttttttttttagacatctaaatttttgtaagaaaaattaaaaattataacaagcaacaaaggaacttcccgtgtctgtctccacaagccactcccctgtcgtctgctgggtgggccagggtggccctgtggggtccgctgcatctaggcccccgggatgtgccccccacacggcccctctctacgcacagaggcataggctcgatcctgggtggttagcggggccccgaggtctgtggctggtcttgggcacaggtgggcttggccagaaagggtgatctcgaggtgagggacccagaagaccctccgaggcggctgacggtccagccggccgcttgagggccttgtggctgg

SEQ ID NO: 5531 - DNA, 160 bp, Bos taurus
  Clone ID: 49-LIB34-012-Q1-E1-E2
gggtccagccacgcgtccgatctaaccatcttttgcagctgacgttacaccagaacatccagtgcctgatcgatatgtttgcagacatgggttaggacaccggtcaccagctcctgcagtgcaccggctacactctcagttccttctacacctctggccc

SEQ ID NO: 5532 - DNA, 269 bp, Bos taurus
  Clone ID: 49-LIB34-013-Q1-E1-E10
gacgcacgcgtccgatttttaattttttttttttttttttttctgttttgattttattctgttttctgtttttgtttacccatattgtgatgtggcatcggatccctgccatgaagatgaagttcacacccgtcgttggagattgatgatgtaatgtgggaacctctcattcacgcaaaggagcaatgggggacagatgtgccagacaatagccagctttaccagactgctcacggaaccgcactgcggtataccgaatctgccgaaag

SEQ ID NO: 5533 - DNA, 405 bp, Bos taurus
  Clone ID: 49-LIB34-015-Q1-E1-E2
ggtccaccgagtcgtccagacgaatgggacgctgatcatgtatgcttgattggacgcagtatctcctcgcgatgcagtctcagtgccaagccaaaatctgagcaacttatggatgttggaatgactttagagtcagtgcttcagggcacaacatcagatttgtccatcgcagtagaaatgactgtcagcctgatgacattccgtatagggaagaggcgaggacgaacttactcactttctagaatctcatagattatacctgcagttttaggaaatctactttacatctatccctctcagaaacgtgtattcatatgtatacatagttataaggtcactttacataaacagatttcatgactctacatttcattgagtcgtgtgaaaagctacctcccagagagt

SEQ ID NO: 5534 - DNA, 387 bp, Bos taurus
  Clone ID: 49-LIB34-018-Q1-E1-E2
agatttgcggttaacatctggtgatgttagtattgatcagtttttgagaaaacgagatgaacgtgaatccgttagttctgatgttagtgagcaatgcactgttcatttgggacctttgactccatcagaagtgcctgagtttgaagccacagagattcttcagaagggtagctggtgatccttcacccagaactgatgctgtagtgtctgatcaaacagataacgttcctggagaaaatattcttagcacaacagagacaacaggagacctggtagatgaaccagaaagaacattgatattaactacgcattccaagttttagtgtaccaatagtaagaccatttggcacagtgctatcaggtgacctcagtggtgttgttgcagag

SEQ ID NO: 5535 - DNA, 76 bp, Bos taurus
  Clone ID: 49-LIB34-022-Q1-E1-E2
aagaactaatctctacgtggattgaacacagatcagatgtctacttgatttggaaactagtaaaacatgtgaatgg

SEQ ID NO: 5536 - DNA, 355 bp, Bos taurus
  Clone ID: 49-LIB34-024-Q1-E1-E2
ggaggactagggccccccagccgcgggctgctacaccccgtcggttggtccgcgcgtccgtccgtgcgtgagtccgggccgccagcttcgccctcgccatggcaccctggctgcagctgctgttgctgctggggctgctcccggccgccgctccggcctccagcaagcccccggcggccggcgcgcaggcctgggaactggcgtccccggagctgctggagcccgcccgcttcgccttggagatgtacaaccgcggccgggctgccgggacgatggccgcgctgggggccgtgcgccgtcgcatccgccgggctggccgggggtccctgtactcgctgaaagcgacccgggtgga

SEQ ID NO: 5537 - DNA, 418 bp, Bos taurus
  Clone ID: 49-LIB34-025-Q1-E1-E10
atctgacatgaattgtattagaagaaaaactgctgtggatgggataacaatgtgttgagagaaacacatagtgttgtctcgccaaatattttgtacaatttttatcttgatactgtgaagaattgttttcagagttcagaaatcttatcttagcatatttaattattcattattgaagatatttcattatagtggcaggctgagtagtgaggtacgtggagagaagaaaataacatcaagaaagacatctgaagacacaatttggatcaacagatcatgggcacatttttaatctattaacatttaactgttttatttattttccccatatatttatattccatttatgtccactcttgaatttgagactttaaataaagcagaattttggttactccttatgaacctaaagaaaaac

SEQ ID NO: 5538 - DNA, 404 bp, Bos taurus
  Clone ID: 49-LIB34-032-Q1-E1-E2
ctcgagaccaagcctgctgaccttggccccagctgtgtgctcttcgataccttcggcatgtgcccctatggtgtgacctgccgctttgccggggcgcatctggggcctgagggccataatctggtgagggacgggttggtccaaggctcgcctgttcgcaagcggcttagacagcgcccttgcacaacagctgcaaacctcggatattcactttaagctttcaaaacaaggcctgcggcagcatatcaagggtccgcttccaagccgcaatcccgaatccactgtcccccatggcatggaggccgaaggtgcttcacggcaagacaactgtgacaatcaacttacccccaggaatccggacaccgttggtcctcccagttggccctttaaggacctgctggccc

SEQ ID NO: 5539 - DNA, 362 bp, Bos taurus
  Clone ID: 49-LIB34-039-Q1-E1-E2
gatcgatctcctggaacagagggtgctattcctcaaggagtccaggtcttcttacaccagcagatcttgccgtctcgcatcatgtcctctcggaatctgttcccatctggcgctcagtagagagtatagaaactgatcctttcacacctggaagatacttcggaaaggactcgcattcatgtcggtcgtgattatgatatactggagtctcaagcgttgagtctcatgcgcctggttcaatcacgcggattcatatgcccagcgacgatactactctgtaggccttaagaatcactgggtttcactatgcttcatctccatttcacctacatgggataaccacattcaaagatgtccatcct

SEQ ID NO: 5540 - DNA, 159 bp, Bos taurus
  Clone ID: 49-LIB34-060-Q1-E1-E2
atcacgcgtattctcatgatacattcccaattctacctgaaccatgtgcgaagtcgtgtctaatgtcgaacgtttgactaatcccggccacgcatgggcatttcaacgacaatatggcataccgagattagatacagattcacccaatcctgaacatat

SEQ ID NO: 5541 - DNA, 209 bp, Bos taurus
  Clone ID: 49-LIB34-062-Q1-E1-E10
gggatgagaggatgagagtagtgatgtttctgtgtagcttggttttcactattgtcttctgccgagccaagaatccttagacatctgttgttgccataatgacaaccacaagcagcgtgtgttgggtgcctgctatgagccaagctctgtgctgagccctttgtatgagcatcacaagctgggcttacatcaacagaaatatatcgtct

SEQ ID NO: 5542 - DNA, 142 bp, Bos taurus
  Clone ID: 49-LIB34-065-Q1-E1-E2
ggccacctcagccatcactggccgttcaggcaggcgcgcacgctggcggctccgcaaaccgtgcggtgtaccacttgcactcccaagaggatatgcgcactgcacgtccctgtgcacacactacatggcccgggaacctcac

SEQ ID NO: 5543 - DNA, 263 bp, Bos taurus
  Clone ID: 49-LIB34-066-Q1-E1-E2
cggacgcgtggggaacggcatcaggcgcaaatagatcattatctgggacttgcaaataagaatgttaaagatgctatggctaaaatccaagcaaaaatccctggattgaagcgtaaagctgaatgagaaagcctgaaagagttaacaatagaggagtttatctttaaaggggatattcatttgattccattggggagggtcagggaagaacaaagccttgacattgcagtgcagtttcacagatctttatttttagcaacgca

SEQ ID NO: 5544 - DNA, 399 bp, Bos taurus
  Clone ID: 49-LIB34-072-Q1-E1-E10
gggccgacccacgcgtccaggaatgaacgctgagaaacttgggaaatcatgcccaaagaaaaccaatgtgtatggaggtagaaatacagaactacaaggaagactgtgtctatgggaagtggtttctaaaatgtaggagccaagcttttctaacttaatggaaaatatttcatttgagagcatcgcaatacaaatcagctgtccttttagtgaccttagcgatttcgtgtctgcccggtatggtgaagttttggaaaagctggttgttttaggttacttgcttagctcatggtcagttctcgagaactggggctcttttatatgctgctcgtggcttaaaagaataaacaaaacttctccaaatgtccctccggagcagtttgcatatttccgggaaaa

SEQ ID NO: 5545 - DNA, 421 bp, Bos taurus
  Clone ID: 49-LIB34-080-Q1-E1-E10
cacgcgtcagttataccatcgtcaaagagaaacattatcggcatttcgtacagatcaccctgtgcgtgtgtgaattgtatggcgggtggatgaccttctgcccagactggcttatgggaagccccaacctcaacaccaacagttggctctacttttgggtctatctggtatttttcaatggtgtttgggttctgatcccaggactgttactgtggcagtcatgggtagaactcaagaaaatgcatcacaaaggatctaattcacgcaaaaagttacagtgaattttcaaagtcataaacactgtcagtttgctttatgagattgaatcctttttttgttgggccaaaatgtaacgcattccagtctgtgcttttctttttctgttgtcattttggaacaacctaattgatttcagtggaat

SEQ ID NO: 5546 - DNA, 330 bp, Bos taurus
  Clone ID: 49-LIB34-084-Q1-E1-E2
aacataacaacatttaaagctgtctgggacaagttatgaaggagtataaatctgaacctcaccttcttgcagcttcaaatacagttatcatgggaaaatggaatacaatttagccattccaccttaattatccagatgagtgtgggcacagctactgggaagacactgggacctttaccccatcttgatcccctgggcttcccgacattgcaacaaatagaagcactgagctgctgctatgacaccagacaagggctcagctctgatgtgagtgatgaaggagcatcctggcctgtgctttcaaccagaatcccaagtcagatgattttg

SEQ ID NO: 5547 - DNA, 405 bp, Bos taurus
  Clone ID: 49-LIB34-086-Q1-E1-E10
gggccgacgcacgcgtccacgcgaacggccgccctttttttttttccaagagcagggctgttctgctgtcccaccatgatgcgggctgtgctgctcctttgctgtgtcttgatgtccccagtggctgccttcccaagaaatgcccaggaaggggtcctgaccttccagccatctatctcagaaattgggcatcctttgaacctgctctccaaccagatccttctaccagaccctaaaacttgccaagatctcttgcatgtggccccctccttagcccctctgcctgagtacctatccaacttagctctggaggtggtcttggaagagattggttgcacaactgaggctcacattctgcagctccagcttgttaagataggaggaaaggacaccactgaaaccctc

SEQ ID NO: 5548 - DNA, 263 bp, Bos taurus
  unsure (67),(78): unsure at all n locations; Clone ID: 49-LIB34-086-Q1-E1-E2
acccacgcgtccggataaaaggagtttttcttttagaaacagtgccaagaatgacaagatataaaanactacttttanagaaaatgcctaacaggtttttaatacagtaatcactgtagttatcactttcttttctagttccttggttttcagctcaggctgcattctctaactcatactgtgaagacaaaggtgtttttgatccagaaatatatgaaatctacatagtcttaatttgtaaaaaataaaattccttaaccttt

SEQ ID NO: 5549 - DNA, 377 bp, Bos taurus
  Clone ID: 50-LIB34-001-Q1-E1-E6
acggtaggtattccgggtgacacacgcgtccgtcgagagcggccgccctttttttttttttttgctttaggttaacctcctcaaaaataatcatgaagcaattaggagaatatgtacattttctctttaaacatggaacctcagtgttattcttatggattctggtgattatatcattttatttaagcattttactcacaggcttcttttcctaagagtttcaattagattactatgtttctatttcccaattacttttttaaaaataaaggatatcttttctgaagtttatttagtatcacagagcagaaatttacatttatacaaatgcaagaaggaaagaccaagatcataaattttgatgatgaaagcacgat

SEQ ID NO: 5550 - DNA, 380 bp, Bos taurus
  Clone ID: 50-LIB34-010-Q1-E1-E10
aggttgaaaattgttttctgtaattgatattggcagtctgttgctgattttctgtggtcacagcattctttactagcctctcatggagtctatctttttaaatcacagtttttgtttgtttcttttctctttatgataaaagcatccatgtgtatgtggcgagtgtaaatcagagaatcattatgtaaggccactgaaaaatgagcatctgtgagtgcctccatgctgatgtttgtttttaagttgagaacagtgtactttgaagaggctgtagtgatttaaactttgtgagaagctgcctgatgggattgccttgccatctacccacctctctgtacagctctcattcattcctgcaaccactgagcttcttatgaaag

SEQ ID NO: 5551 - DNA, 387 bp, Bos taurus
  unsure (347): Clone ID: 50-LIB34-010-Q1-E2-E6
cacctttggaggaacatgcacactcagcaaatgaaaatctacagctggtaaaccatgaagcaaattccatggcagtggatgttgttcctcacgttgacaacccaacctttgaagaagatgaaagtcctgatcaggagaccactgttcgagaaattaaatcataaaatctgtatcagtagaaaacctgaacctttagtaataacagaactgccaatcagggcctagtttactactaaggaactggataaacttaataaaataagaatgatactgaaagtgctgatatgactaatattatgctatagttaaatgacttaaaatactaaacctattaaccttttccacanacacattataatgtttttcataggcaagtttcctcttgat

SEQ ID NO: 5552 - DNA, 409 bp, Bos taurus
  Clone ID: 50-LIB34-017-Q1-E1-E6
taggaattaaagtttcataaatatttgattcaaaatatttcataaatattttctgattaaatatgattggattatgcaatagtatatgtaatgtgggaatgtttttgtagataatacagctgtgtgatctgtacttccacataactgggagtggaagggagttaggtcctccctggtgccagccccagtgcttgtcaaattggttgacaagtcacattgtattgtagttttattctttgcagctcaagcatgcagtatgaatactatgtattttttttaaaaaagaatttagtatcaaggcttcagaaaatgccatttacggcatcccttctgtatagcataagagaaaacaatgttaggatggtgataagaattcactctttcaaagcgcagcttatttttctcagtt

SEQ ID NO: 5553 - DNA, 103 bp, Bos taurus
  Clone ID: 50-LIB34-019-Q1-E1-E6
aaacacatcacaaggcctttcaagaatagctcggactgctcagacttcatagcccagatagtgcaatgttaacattttaccctgggttttaactccccacggg

SEQ ID NO: 5554 - DNA, 309 bp, Bos taurus
  Clone ID: 50-LIB34-040-Q1-E1-E6
ggataaagaagcagaaacagagacagtgatgaggattatcctgaaaaaagtgctggaggagaagaccagcagtgagaagcacagagtggtgttacgacggtggaaaaaattacaattgcctaaaaagagtatgctcaaataaatggattgcttttcagtgacaaacctgctttgtagtggtccaggaaggggccaggttcaaaagaaaatgtttgtattaaaataaagttcccccaccattttttaaaaatgctgaccatttttgtccaattcaggatccccattggggcccttgaaaaaccttccctt

SEQ ID NO: 5555 - DNA, 181 bp, Bos taurus
  Clone ID: 50-LIB34-043-Q1-E1-E6
attccagcctccgcctttgtatgactacacgcatcacatgcttatgttggtaaccacaggaatctgttcacaggggtctgtctcaacatctctacctatggaatcccaacgtcttccgctggttacagactcatccatctacctgtgtaaggtcctatacacagctgtacgactgtctgtc

SEQ ID NO: 5556 - DNA, 206 bp, Bos taurus
  Clone ID: 50-LIB34-045-Q1-E1-E6
gaccatcacagcattcaggattgctattcgcaaatgacccatgacagctacaagggctagaatatcaaaacccctcctaagtccgttgcatgacataacaccggcctaaacgcacaagaacaattaaatattgcgccaattggggcatcagaattctcacattcctataggtcacaccgcacttcacctatcggactcaccatcag

SEQ ID NO: 5557 - DNA, 168 bp, Bos taurus
  Clone ID: 50-LIB34-046-Q1-E1-E10
cccacgcgtcaaaagatctccgacgactgccacgtctatgtaatcacacacggccaactacagatctctcacatgcctcagggggagcacgtgcagatcacgcactacagtgatggcatgctgcaaatacacgatgtgggacaggatgggcacgtgctctaaggggcc

SEQ ID NO: 5558 - DNA, 162 bp, Bos taurus
  Clone ID: 50-LIB34-048-Q1-E1-E10
accacgcgtccgtactactagtactattagagctagaattagtaagagggcccttaagatgtctttagtgctagggtaggggtcctcggatcagttctggctcttttgcgtctatctcgggtggggcttacgtgcctcgggtgctcagaggctggggtctgt

SEQ ID NO: 5559 - DNA, 240 bp, Bos taurus
  Clone ID: 50-LIB34-052-Q1-E1-E10
ggggcacggcggcgaccatgacccagcaaggcgcggcgctgcagaattacaacaacgagctggtcaagtgtgagtggccgcgcggcgaggccggcgggcaggctgggagggcggcggggtcgccggcctgcgggcccgggccggtgctggcccgcagcgcgcggttgttccggccggagcggcccggacgccgggcggagccgcggagtggccgccccgagagccggcgtgtgtggcgcg

SEQ ID NO: 5560 - DNA, 230 bp, Bos taurus
  Clone ID: 50-LIB34-052-Q1-E1-E6
gatgcttgctcttttcagtgaggagtcaaagaagagatctctgagtaggaaggcatgcaaaggaagccacagaaacattgggctcctcctaggctgtgtttttattgtattttttcaacattttgggtcaattcttaaaaattcacagataattaatttccttttttcaattggaagttaaaggtaaaaaaaaaaaaaaaaaggggggccgccccaaaggattcaagctt

SEQ ID NO: 5561 - DNA, 217 bp, Bos taurus
  Clone ID: 50-LIB34-058-Q1-E1-E10
ccaagacagcataatgaactcaggagagaaaagaccacagcagaggctcctctcttaacccagactcgacttatcactcagagtgctctgcacagagctcctcactataacagtttctgccgccggaagtacagacttcgattcttctctgtccagaccagaagcccctcgtccctctgtctctcgcccccctttgccacccccagaggttgaaccc

SEQ ID NO: 5562 - DNA, 112 bp, Bos taurus
  Clone ID: 50-LIB34-059-Q1-E1-E10
gactagttctagatcgcgagcgcgctcctcctcccctgttcgttgtttgtcggtgtttctcgctcgctctccttttcctccccttctttctcgggggtttttgcttctttgg

SEQ ID NO: 5563 - DNA, 114 bp, Bos taurus
  Clone ID: 50-LIB34-059-Q1-E1-E6
gagctacccagtcatcagagtcagtatgtcttataaaggagtcacaaagaggaaaacagatgctattttgttgttcagaaaaaataaaataatatagctttggctatcttcctt

SEQ ID NO: 5564 - DNA, 200 bp, Bos taurus
  Clone ID: 50-LIB34-065-Q1-E1-E10
gcgggagggacatgagtgtccctgggccaccttccccggacggggtcctggcagggccacccgaaggcctggaggccggggacctgacgccgggtttaagtgacacttctccagatgaagggttaatagaggacttgaccatagaagacaaagctgtggagcaactggcagaaggcttgctttctcactacttgccaaat

SEQ ID NO: 5565 - DNA, 209 bp, Bos taurus
  Clone ID: 50-LIB34-068-Q1-E1-E6
agcctctacactgagtcgtatgagctacagccggtgcaatgcccaggctgtagcggatctgcattctgcgcgcggcggtgtcctccgctcgcctgcatcgctcacatcagtctcagtcccctggcattactgggtaatgataccgagactctagcccaacgttttctgaatccgttgaggaaatcatggagtcctgaggaacatggcca

SEQ ID NO: 5566 - DNA, 398 bp, Bos taurus
  Clone ID: 50-LIB34-071-Q1-E1-E10
agaaagcggtcattcagatcaagagaggcacggaggcaaaggacgtgttcagatcatctcattcctctggcttcttttttttccaagagcagcagggctgttctgctgtcccaccatgatgcgggctgtgctgctcctttgctgtgtcttgatgtccccagtggctgccttcccaagaaatgcccaggaaggggtcctgaccttccagccatctatctcagaaattgggcatcctttgaacctgctctccaaccagatccttctaccagaccctaaaacttgccaagatctcttgcatgtggccccctccttagcccctctgcctgagtacctatccaacttagctctggaggtggtccttggagagattggttgcacaactgaggctcacattctgc

SEQ ID NO: 5567 - DNA, 331 bp, Bos taurus
  Clone ID: 50-LIB34-072-Q1-E1-E6
catctacacagtgtgtttatatttattcagctaaacacatacaccgtatctacaacatcatacaccacatccagaacagcttgctttagtaaaccacagtgtgattaattgaccaagcacagtctttcaggttccggcacactctaacacaacctacccctgcagcccatgtagatggccaggctttaacaggagtccattttcttctatggggctttttccagtattgcactttaaaggagccacagtgggatcatgatacgcatttcacatcatgatcagtcgggggtccctagattgtactggtagatacagagccgtgaaaacacat

SEQ ID NO: 5568 - DNA, 420 bp, Bos taurus
  Clone ID: 50-LIB34-078-Q1-E1-E6
acaatactatatatagagtcgtattagtgggggtcagttcaaacgtcatcctcttttgaataaatctctcggtggtatttgaaaaaatacatgggaataaagaaaaatatcatctttggccaaatcaagcaggcatctttttcctttccttgacacttagctcattctacttgctgattggattacaagagctgtgtaaaaaatacaaaaacatcctttcgtttacaaaacagttattctaggcttgaagcctctgaacagcaaatcaaatagatgtgctgcgtctgattcacttatgtaattttacaaaaggctcctgggtctctgaccccagagagttagaatacccagaggaggtcctctgcattaaaggattaagacccccaacgatgctggcaagcaaatgtattaatttcttaa

SEQ ID NO: 5569 - DNA, 64 bp, Bos taurus
  Clone ID: 50-LIB34-079-Q1-E1-E6
tcaacccacgcatccacaccacaactaaattctctcatgtcagagacttgctgcagtcggcact

SEQ ID NO: 5570 - DNA, 329 bp, Bos taurus
  Clone ID: 51-LIB34-014-Q1-E1-E4
gcgtccgattctagattctgttcagttagccttttactgactgtctcaaattgttccgatattacctgaccatttgccacatccagtttccctggcagttcagctgttcactattcaactagagggactaccgttaggggctattcatagtcaacagacacgtcgattcatgcttgctggattcagatgtaactgtatgaaatctttgaccatcaacatctagtttgctgaataggcagttctctctgtttcctgtgaaactaacagctgccccatgcagatgaattgtttgcttattgttattttaatagaacttttctgttctctca

SEQ ID NO: 5571 - DNA, 401 bp, Bos taurus
  Clone ID: 51-LIB34-017-Q1-E1-E4
aaaaaaaattttttaatgtgaccttagaattggtcaaatcatttttcttactagtgctgctggatgctttgggggtgagctgcagagcctgccggtgggtgacagccgggccctcccactgcactggccagacctggggcggggtgggggtcaccctttcgtaaaccagtaccaccaggtgtcatgcctgagattggaggacagtgtgcaggtttcccaccacaaaacaagcctcccggcatggacagggcggtcggccacgctcagctcgaaccaggacgagctgatggtgcctgggggacacgtgaggagtctgacacctggaaccatggggcatgtgccctgagaggctcagcagcttccggccttctaggtgatgccaatccaggccggcagttctc

SEQ ID NO: 5572 - DNA, 398 bp, Bos taurus
  Clone ID: 51-LIB34-030-Q1-E1-E4
tgtacctagaccatgtggagaaaggactgagaccagaagcagaaaacagacattgtccatacagagcaaagtgccagacaacagctcgttctagtaaaaggcaataaaggccacatgtgatgatcgcctcagttcaaaactggtagttactaaggaaatggcaggggaattagacagatgtctctgctgactcagtaaaaaatgtcttctttttgtaatttgtggcctgtacgcttgtaaattaagatgctttgagttgtcaagtactggacttttctggtttgtgggtaagatcctaagccaaaatagaatgcagtattcccccaaaagtaacttgggacctttgccttaacacccaaggcaaaggtcacattaatttagataactaggttagaact

SEQ ID NO: 5573 - DNA, 382 bp, Bos taurus
  Clone ID: 51-LIB34-039-Q1-E1-E12
ggtccacgcacgcgtctagaattaatcatctgatctgtcccaggcccagtgctaagcactagaaatccaaaggtgacataaaacctagtccctgctctcaagggactcaccctcccattgggaacaacagactcttaaaccaacaatcaatgcagaatggcaagtgccataacagcagtatgtgtgggaacatcaggaaatcagagggtgtgacctgatccacctaagggtcagaggagggtccaaggagaaagtgacatttaagcagggttttgcaggatgcgtaagagttcacctagcagacaaggcaaggaagtgttgcagaaagggaacagcatatgcaaagacacatccgttcacagcctcacaccttttcacaggg

SEQ ID NO: 5574 - DNA, 369 bp, Bos taurus
  Clone ID: 51-LIB34-050-Q1-E1-E4
cacccacgcgctccggaacaattcagtttcccggcgctctaacagtgacatgcgtgaaagcattaggcacatacccagaagtcacactcatgttaccaataataccttcgttaaaagtttaccttgggtgctccaagtccatgtttgtacttcctacgcatgtgtccgcactggacagtgctggcatcgtacacgtggggaagacaatttcacatttaccatcagtatcagggtggcttctgcatacagaactgggtaacaagatacttatgcacgttaaagtaagcctccaattttgtgacatcggctacaagtttgggaaaatttcggtaaggtactttttagagttcaggaaatttgttaattttt

SEQ ID NO: 5575 - DNA, 238 bp, Bos taurus
  Clone ID: 51-LIB34-054-Q1-E1-E4
cacggaggcaaaggacgtgttcagatcatctcattcctctggcttcttttttttccaagagcagcagggctgttctgctgtcccaccatgatgcgggctgtgctgctcctttgctgtgtcttgatgtccccagtggctgccttcccaagaaatgcccaggaaggggtcctgaccttccagccatctatctcagaaattgggcatcctttgaacctgctctccaaccagatccttctac

SEQ ID NO: 5576 - DNA, 215 bp, Bos taurus
  Clone ID: 51-LIB34-065-Q1-E1-E4
acatctccaaggatgacctggatgccattgaggtcatgagaaaccactggtgctcttaccttgggcaggatatcgcagaaaatctgcagctgtgcttaggggagtttctacccagacttctagatccttctgcaggaatcattgtcttaaaggagcctccaactatgcggcccaattctccctatgacctttgtagccgatttgcagctgtcatg

SEQ ID NO: 5577 - DNA, 200 bp, Bos taurus
  Clone ID: 51-LIB34-068-Q1-E1-E12
cggacgcgtgggtctcaaaccaccagtcctggtcgcactttgagcggggatccaaaatgtccgaggagtgatggatgttaatgtgttcaggcgtctttgcagaaggcagttagtcccctaagaccaacacaaaacatccatcattaagatacgctcaccctcacttcaatgccatgaatcacctgtcaggagcaccgtga

SEQ ID NO: 5578 - DNA, 229 bp, Bos taurus
  Clone ID: 51-LIB34-070-Q1-E1-E4
ctcagcgcaagcccagtagcctcccttagactcagggtgcctggcgacatggccggcggccaccgcctcctgctggagaacgcgcggcaagtggtgctggtgtgcgcccgcggcgagcgcttcctaacccgggacgcgctgcgcagcctggaggtgctggagggcgccagcctggtggtgggcacagatggtttcataaaagccatcggtcctgctgatgctatccaaa

SEQ ID NO: 5579 - DNA, 384 bp, Bos taurus
  Clone ID: 51-LIB34-072-Q1-E1-E12
aggacactcattgaaaagaaatggacttgcatcctggaaatatattaactgttaaaaagaaaacattgaaaatggttttagacaacgtcatcccctggctacaaacaaaagatattcctgggtaaaattggaggtagctagtgccgaggtcaaaagataatgatctccctgtttataaaccttcactatatttggatatccctaaaactgtgttcttaaagtctaagggcaactttagaaggctggatgtgcccggggaaacaggagatttggattcacaacactaaggagatagcacttaactatcttaactgttttgtgtttccagttagtgaattgggataaaagtgattttctagatactttttaacactctgggctatg

SEQ ID NO: 5580 - DNA, 255 bp, Bos taurus
  Clone ID: 51-LIB34-072-Q1-E1-E4
aaaaggaggcacaccatctgggtttcacatacgctgtgactctctgtcagtccgtaccttattgaagttcgtccattgtgaatgcatgggaacatctatacatttcaacctataatcacccgatgttatgctgggcacaggacactatgcactggcaaacagactcaatcaggtcgctagggtcacacaccatcagtcacggtcatccaatgatgattcagctatcacccctcggtatcacactgcgtttgcgtc

SEQ ID NO: 5581 - DNA, 411 bp, Bos taurus
  Clone ID: 51-LIB34-078-Q1-E1-E4
taacaacgtattaacagcattacgtttctaaaattttatgccatattgtgacacctttctcatggaggaaattaccgttttctgtttttagaatacaatttttgaccatccagtgattttgggtgctctgcctggatttagtcaatttaagcaggttttttttctttgttttagtgtgtggttccgtttttcagattgaaaagtaataggaattttcttatttgtaggaaacgttttttacttgtagcttgagtcttggtaaagagaatcttgaatgaagcatgtgcttcctctctgcacgtgcacaatcgctacatttgcacaactgaaattgataaccttgtgtcagtaagatacggacgaaaaagtcaagttgttcatttctgtttgggatagaaagccaagggaaat

SEQ ID NO: 5582 - DNA, 107 bp, Bos taurus
  Clone ID: 51-LIB34-084-Q1-E1-E12
cacgcgtgcgagccgggatagacagagtcttcttcatggggcatatcgttgcaccctacatgcgctccatgattgatgaatatgaatctggatacgtcactcatgtt

SEQ ID NO: 5583 - DNA, 155 bp, Bos taurus
  Clone ID: 52-LIB34-001-Q1-E1-E8
acgcgtccagttatgcgagcggccgcccttttttttttttttctttggttttttttctcttttttgttttttttcttttacttctttgttttccattcaaagaaaatgcgctccgttccaccgtgggggtttttatggaaaacttccttacatta

SEQ ID NO: 5584 - DNA, 271 bp, Bos taurus
  Clone ID: 52-LIB34-014-Q1-E1-E12
aatcatgcacacgggttcagggccctcacctgaaatggtgctcaccccttcactcctctcctccagcaccacctgttccccagttctcctggttcaagccctcctgcgtcctgtggcctgggcggccttctagaccttgaacagatccaacccaagccatcgcctagacccactctgagcctacatccatcagcctccacctcaattagcatcttagcacgagcatcaattccaactcagtcccagccctaaagcagccctgaagccaagc

SEQ ID NO: 5585 - DNA, 362 bp, Bos taurus
  Clone ID: 52-LIB34-016-Q1-E1-E12
ctcaggcagagttcataccgagatgagaaaatactcacaatggaatactgtagaagtgctggaaatcatattcgctgatattggaataccaaaaaaagaattattgttgaaggaacgtagaagtcaaaacatgttccccaaaatgaccctactcagacttaagcctataagacttggatatagtgtgctcgtaggtcactctgtccaggataacactggcttatgcctgttgtctgggtgtaatcattaccagactcctttttagttgcaaaaggtcctcacttggatagtcattcaccctacaaagatagctcttaattcctagaaaataaaagcagttgattggaaaaaaaaaagcaggg

SEQ ID NO: 5586 - DNA, 222 bp, Bos taurus
  Clone ID: 52-LIB34-024-Q1-E1-E12
tacagtcactcgtattaggcctctccagctcaccatggctcgggcattcagagtgccagttgcactgtcactgttcgacttgtgctggtctttagctaaatcccacccgggggctacagcgcctgaacttgggcacagagttgattgttagaacttcaccaagccacgatccagaagtccatgcacagctcctcagatggctggggcattgcctctaccact

SEQ ID NO: 5587 - DNA, 441 bp, Bos taurus
  Clone ID: 52-LIB34-034-Q1-E1-E12
tatttttttaatgaaagtagatatgtctgagggtggctaaatgtaagtaattattttctttgtaaaaaacttctttaaaagatttctacctcattgaccccattttgatggtaataaataagtctgactttataaaaacttagaaaataaaaaccaacctaggttgttttatccaagtggacaatttaaagtaaaaacaaacaggtgatatgtatttttaccttaaaataagtttgagatttctgaagtctatgctatgaagaaggatgccaacaatctcactcattaccatacataaaattaagctttctaaacgcaatctctttagcatgaaatcaaatacagtgtgctcttagaggattcccaaatgctatctcttccagctctttaaaagccagcttctgtttctccaaaaaacagagtatattcaatattgcaaaa

SEQ ID NO: 5588 - DNA, 78 bp, Bos taurus
  Clone ID: 52-LIB34-034-Q1-E1-E8
attcatttatacgtttctagatctaagactcatatcaacgtactcatgtgtatttcaggatagccatttgatgcaagt

SEQ ID NO: 5589 - DNA, 402 bp, Bos taurus
  unsure (268): Clone ID: 52-LIB34-035-Q1-E1-E8
ggactggacagcagtgatcgtctgattcttttgattctaaaacagatgttaaacctgataatagctcaccatgttcggtaagatgtttgtgtattgcccataggtatgtgaactttgttttttaaagataccaacctcttaaatttgtgagaggtacattatgagggactgcatttatctaaatttcacctttagctggctcaatagcctccctaaagtcagaaagttttccagcatcaatttttgatcctgagttgacaagcttggnaacaagtgaatggattatatcatacttctggactttgaagttgattaaccaacatagacctcttattgtagtgtcagtgtgttagggagaccttttaccgcccgtgaagatttgctatgacattttgactttac

SEQ ID NO: 5590 - DNA, 404 bp, Bos taurus
  Clone ID: 52-LIB34-036-Q1-E1-E8
acggcaccacactttcaaccttgctaacgtccagatagatgctaggactttcaaagcccctaggtttatttttaatcttcagtaattttttttaagggcaaaagacactgactgtattggcatagcttcctctgtatttaagaaaactcagttaatttcctccttggtgcttcaggtattcagctttcttcaggccgataatttatataacccctgacatgaattttagatccaacccttaaaagatatcttctgaagatgcctttggtttgaaataggaaggttgaatgagaccctaagtattttaggattttttttttaataaagtttttatttccccctttagcatgttggcctgtttgtaggtaacgctgggcagaggggtatttacaacctgatctctc

SEQ ID NO: 5591 - DNA, 156 bp, Bos taurus
  Clone ID: 52-LIB34-037-Q1-E1-E12
aatcaactcagtgtcgacacatttagcataaagtaagtgcgtggaaaagttccttgaacgcgggttgcatgacagaacaacaaatgacctccgacatgaccctcaatgaatgttcaaactaaatgacctctgaaagcaaaggatcagacttaaatc

SEQ ID NO: 5592 - DNA, 417 bp, Bos taurus
  Clone ID: 52-LIB34-037-Q1-E1-E8
gggtcacgaagagtggggcacgactgagtgactacacttacacatgggtttgaagccactttgttcctaaactttctgaatgtgctgtcacaacccagagtacagcgctctgagaggggccaagcgggagtcctgtcctgggggtggccgggggcggggcatgcgtctgggccagagccgaggatcctctcaagagtagtgaggtgaggaggctccagagtccagggcctggcggagccttcgtgggcagcactgggcacaccctgcagatggggaacccggctcagagagctggcgtggctgggcccaggccagcctgtgagcggggctggtctccaccgcgcgtgtctgaggtgtctcaggttatttgacccttacgtcacagcgtgccaggtgctggagtgtgggccagagcac

SEQ ID NO: 5593 - DNA, 302 bp, Bos taurus
  Clone ID: 52-LIB34-038-Q1-E1-E8
tacctagtcagtatatgtccacaggccatatcagggtcacaagagagacatatagcagcagagggactgtggctagtgcagtggtgtagtgtcagttctgcatattctttgctgggtttaatgtactgatctagatatgctgtttttctgcgcctttgctgttgtgatcagactgcattgacagagcaagttggatgataccatcaagggctcttgcactctccatttgaatattgcataattaatagtgctctgcttctaatgatttgaatggactcatacggtcatcttgtcctgtttga

SEQ ID NO: 5594 - DNA, 150 bp, Bos taurus
  Clone ID: 52-LIB34-042-Q1-E1-E12
aggaaggtcacctttgggaagacctactgttgtgacctgagaatgttgatttgcagatgtggggcagggacagtgacatttctatagtcgcagacgcacagaattatgggagagaatgttgagttcgatacagtgtggcgcgctcttttc

SEQ ID NO: 5595 - DNA, 383 bp, Bos taurus
  Clone ID: 52-LIB34-044-Q1-E1-E12
aagagtctcttgggtcttcctgagccctcatattaatatctgttctctgcatatcctggatattgatatcaaattgctgctctttagtttccatagtctaaaaaatgggacattttatgcttatcttgttatttccatcttcatagtctctcatatgtaagttatacctgagtcttcaaagcttagttatcttagttatatcactctctgtataccaccatatctgcaagttttaggacatgactgaaactattcagtacatcagtatttgttcacacattttaaaattcttcctattttttgtatattctaaaaaacatctacttgtttgctacttgtatagtataagcaagataaatttagttttagaacaaatggttggc

SEQ ID NO: 5596 - DNA, 402 bp, Bos taurus
  Clone ID: 52-LIB34-048-Q1-E1-E8
acataggcacagctgattcttctgtgccttaatctgtccttattttgtttgcaccataaatagtgtggctgggtatagcgatcaggatgaaaatatgttttccttcagatctttggaagacttaactctttttctttccttctcaaaatttttttgttcttggaaaggtaagaaaaaataaccaataaaacccttctgtggcctcttagcatccagtattagtggtgagaagcccagtatgagaatgtgagattttttccacttttgtatatcgactttggtgtgcgtgtgcatgtgtgtgtgtgtgtgtactcttgtaaagtttcctttcactttgaatgctgatggtttcgcagcaggtaggggccatggatgtgcctttcccaccatccctggcatttc

SEQ ID NO: 5597 - DNA, 230 bp, Bos taurus
  Clone ID: 52-LIB34-051-Q1-E1-E8
ggcggcaggagggcaaccttgcagtttctccgcggcccaccccaaaccagataaggcagaaatacagttttcccatccattttacaaacgaggagacggaggagcagtaaggggtcttgcccagcaaccctgtcctggagctgggattcgctctgacttggtgacccgccctctgaaccagacaggtggctgcagcttcagaatgtggcagcttacaagcctcttactgt

SEQ ID NO: 5598 - DNA, 252 bp, Bos taurus
  unsure (21): Clone ID: 52-LIB34-052-Q1-E1-E12
gaaagattcagatttctcacngttcaaattctggttactaatactttttggggtctattgataaatggagcaattttaaaaacccctgcaaaaatgattaaaaaagcacaccaacaaaaaaaccaaaaaaccaactggtgccaaaaagttaactttcaaaagaaacctttccaattttttaattcagaaacaaaacattgtcattttttatttggacaggagctgctttgagaatttcaaattgtatattaa

SEQ ID NO: 5599 - DNA, 412 bp, Bos taurus
  Clone ID: 52-LIB34-061-Q1-E1-E8
actaaatcaaatattctattgagcagctctatagacaactctttacaaaagtattatttgatacttttaatacatcttgcactttagggggaatgtgtacaacagaatcagggagagccagtcactaaacacttttgaccatcacaatccctggtgggtgggaccttttcaaaactgctatttgatatattacataggtaagaattaatccacagtgattttgcccatttcttagagagtatgttcatagcttaaatctatgttttttgagcacatattttatataacaacagacacatatactattagctttgattaaaaatgttcatcccatcgcccctgatatttctggaaagcaagaaacaaggtttcctggaattgccttggttttcaccctcaacccccaactgtc

SEQ ID NO: 5600 - DNA, 264 bp, Bos taurus
  unsure (31),(33): unsure at all n locations; Clone ID: 52-LIB34-063-Q1-E1-E8
agtccgccagttttgtaatacgggtcaacananaccgagtacaagaatatggcctgtgttggagacagacaaagttgtaagaagcttgatagatggaatactttacgataagaaaatgatttttgtaccatcatatatcaatatctccttaacaataaagagatttcttcctgaacgttctgttgcaaccataaatcaagttcaggatattcattttgaagcaatgattgggcaaaaaatcaaaatgaaatgaataaatgagct

SEQ ID NO: 5601 - DNA, 201 bp, Bos taurus
  Clone ID: 52-LIB34-065-Q1-E1-E8
caggaagggcgcgggggtgagccccgccgccgcggctgcaccttataactccacacacagcccttatgctgccggacctgtaccatgtctgcttgggtatccctcctgctgctctggggtctgtcgctgaccccagtgactgagcacgctgatgttctttgaccccaggtcatccctgtgggccgaggccggctcatcgct

SEQ ID NO: 5602 - DNA, 260 bp, Bos taurus
  Clone ID: 52-LIB34-066-Q1-E1-E8
gcgtggcttgccatttcttactccaagggatttttttctgacccaggaactgaacctgcatctcccaagattcctgcattagcaggtgtattctttaccactgagtcacctggcatgccctgataaccatgatgatgccaatataaaaacctaataaagttcaaacatcagatttattatttttgtcaaaatataaaccttgaaagtcagggactgtgtcttagtcatagaggcttcccagtgtcaaacacaatgtctaa

SEQ ID NO: 5603 - DNA, 206 bp, Bos taurus
  Clone ID: 52-LIB34-067-Q1-E1-E12
ggatggagagtccgtgggatctctttacggcctctggactggaggccgagcccccgcccgcggccgagccccgcgcccggcgtctccgcccggggtgctctccgcagtttcctggcttggaagcctcgggaacatggcgaggcagcggtggtttaacgggaaggacggtgactgttagcctgtgaacgaaagcgagagtgagccgc

SEQ ID NO: 5604 - DNA, 162 bp, Bos taurus
  Clone ID: 52-LIB34-067-Q1-E1-E8
ctatgctttcagcttgggcaacatccctggcgaactatgcatcataagccattaaaggtttacctgaccctcatccccaggtcaccatgggagattagtcacatctacccggcctctgctctgactacctctgtgatgacttttgcagaccctgtggtgtat

SEQ ID NO: 5605 - DNA, 216 bp, Bos taurus
  Clone ID: 52-LIB34-069-Q1-E1-E8
aaatggtttacagtgtgctttagggcatatttcttaaaaattccagcagtgagaaataaaacccctttgaatttagcactctggttctaaactgaaaagtctggaatatgtggtgcacacagcagcttcatgaatgagtttcttagtttttataatgcaccatgtttctcaaagtttgtgctttttcaatttttaaaacaattttactgatgtata

SEQ ID NO: 5606 - DNA, 394 bp, Bos taurus
  Clone ID: 52-LIB34-072-Q1-E1-E8
acgttattacaagtttgcaggcacgaaaggaaagagccatggtccatgccttcctcatccacaccctgcgggccgcaaaggctgaggagggcctttgccgagtgctctactcctgcttctttggcgccgagaattcacccaatgactcacaaccacacagtgctgagagggacagacttctccgaaaggagcagattttggctgtggccaggcaggtggagtccatgtaccagctgcagcagcaggcgtgtggccggcatgctgtggacctgcagccccagtcctcagatgacccagttgcccttcatgaggccccatgtggggccttccgcctggcgccaggggaccctttccaggagcctcggacagtggtgtggctaagcgtgctctctat

SEQ ID NO: 5607 - DNA, 232 bp, Bos taurus
  Clone ID: 52-LIB34-078-Q1-E1-E8
caactccatataggagtgtcgtattatattcctcttgaaccaaggtacttaaaaaaaatgaacttgttgtgttggtagacgtcgatcacggactgctagtaggattagtgcctgttctaataggagactgtgggacccgctgaatcattgactatgtaaaactctgttcggaaggcgtgtcagccttggcagcaggcgtatccgtcacttcaggaactaactggcccttctg

SEQ ID NO: 5608 - DNA, 318 bp, Bos taurus
  Clone ID: 52-LIB34-085-Q1-E1-E12
ccgggccgacccaagcgtcagctcttgctatatgtcaaacggcctgacatcattatcatgttttgaggaataaacattacacagatgaataattagggcaaggtacagaaaagttgtacattttaaaaatctgcatggacttagtttaagtctatcaatataagtttagatctgtatgtactagatttatttcagctttgtttaagatgtgcagtgtgatctatcagtctctaacgatactacttgacattttacaaacactcggattttttaatctgataggaaagttactttgagactaacaatttccattttaac

SEQ ID NO: 5609 - DNA, 400 bp, Bos taurus
  unsure (26),(72): unsure at all n locations; Clone ID: 53-LIB34-011-Q1-E1-F10
cagacgcgtgggctgttctgctgtcncaccatgatgcgggctgtgctgctcctttgctgtgtcttgatgtcnccagtggctgccttcccaagaaatgcccaggaaggggtcctgaccttccagccatctatctcagaaattgggcatcctttgaacctgctctccaaccagatccttctaccagaccctaaaacttgccaagatctcttgcatgtggccccctccttagcccctctgcctgagtacctatccaacttagctctggaggtggtcttgggagagattggttgcacaactgaggctcacattctgcagctccagcttgttaagatacgaggaaaggacaccactgaaaccctcatccgtgagagcaaaaagcacaatgaatgacaagggactg

SEQ ID NO: 5610 - DNA, 396 bp, Bos taurus
  Clone ID: 53-LIB34-014-Q1-E1-F2
cgtccgagatgaaggtttataggaccatggacgggcttgactgggtagaagtgagcagggaaacttaagagaaaatcagttcgccttgggaagtctcagatctgtgaccagagttggggaggcttgaaatgatgagaccttttttctcttcgaatcctcaggtcgaataagataaagatgctcggaggcagagttcagtggtaagcgctgcagcttggtggatacctatgttctttgtcctatgttctctgggaacctgggctgggtctggattcccagaatctaggggatccacctggtttcatcagagggccaatctgggtttatttagtcgctgcagggtcaatcctgggccatttcctctggtcagtgagcagagatgtgtgtgcatttggg

SEQ ID NO: 5611 - DNA, 326 bp, Bos taurus
  Clone ID: 53-LIB34-021-Q1-E1-F10
ggaaaattcagccatccagtgtcagtgtgtaaagaacggaataacgacataggcatgacacacatggttcagcatcacaaacctaacactctacaaggagatagtaaactgcatcgtcaaacaacttcctatcttggaatccaaaccacaatggccgcccagtacctcattcgaacccaggaccagcctcgggctttcagtgcctggagattctcaccagacacttgtcgcagtggttatgactggggcaggaaaaattgcaacacgaaacaatatcctcagagacaaagtgtttctgtctagcttttcggctgtatccatcacca

SEQ ID NO: 5612 - DNA, 366 bp, Bos taurus
  Clone ID: 53-LIB34-026-Q1-E1-F2
gccttctcccgcctccgctacctggagtcgctcgacctcagccacaatggcctggccgccctgcccaccgggagcttcaccagctcgcccctgagcgacgtgaacctgagccacaaccggctccgcgaggtctccgtgtccgccttcgccacccacagccagggcagggcgctgcacgtggacctctcccacaacctcctccagcgcctgctgccccattcctcgcgggctggccagccggcgcccaccattcagagcctcaacctgggctggaaccggctccgcgctgtgcccgacctccggggcctgcccctgcgctacctgagcctggatgggaacccgctggcagccatcggcgccggcgcc

SEQ ID NO: 5613 - DNA, 274 bp, Bos taurus
  Clone ID: 53-LIB34-028-Q1-E1-F2
aaaaatattaaaaggctgtttccaagtgggatggctaatgaagttctaattattgcagacatatttttgagatgtgaaaaaaatttaggattaagtgataagtcttcaaggcgactgaggaatcaaatggatgtaaacatttacatgggatgcattaggaatctgctgtgtgtattgtcttttggtcgaaacaaagtacgaccagtgaccaacaacatgaagtcaatacgcaatgatttaggtgtcaacggggaggtgctacagcaaattaaaa

SEQ ID NO: 5614 - DNA, 149 bp, Bos taurus
  Clone ID: 53-LIB34-034-Q1-E1-F2
cccagtgacctctgaagatggaagtctcgatttgtctgacctggatctctctggcagctcgtctcccaaacggtactctgtagatgaaatcaaggatacatcacatcatcaatcagcctgttacaaaattgccaccatcactgtccaac

SEQ ID NO: 5615 - DNA, 364 bp, Bos taurus
  Clone ID: 53-LIB34-039-Q1-E1-F2
acggcccggaaggggaactgcgcgcttgaggtgtccagggactgaggtacggctcccccgggcctacaggtaccgcggtactctgcactactgactgtcggccctctggggccgctgccgacgtgtggggaaggtcggaagctgcggcgctgcagactgcgtcacggcctggcggcccgtcagttttctcctgcagcgtttcagatctgcttggtaaacctggtgtaccaccatgctggccgcaagacttgtgtgtctccgagcactgccttctagggttttccacccagctttcaccaaggcctcccccgttgtgaagaattccatcacagagaatcaatggcttttgcacccagcagggaat

SEQ ID NO: 5616 - DNA, 84 bp, Bos taurus
  Clone ID: 53-LIB34-043-Q1-E1-F10
cccgtcacgcggggctgacatccccgggggcctgccggggctttcgggtgcaaccgccatccaagctcctggagatcttccggg

SEQ ID NO: 5617 - DNA, 391 bp, Bos taurus
  Clone ID: 53-LIB34-046-Q1-E1-F2
aatagttctagatcgcgagcggccgccctttttttttttttttttgcgatagcaggtgacagcgtgattatcccaaagtgccccagccagcaggccagctgtcccatggactctgcccaaggtcagggctccagtgcagaagatgcagttgccacggtgttgggaaaggctttattcagtcctggagaggagccggcctggccgggcagaggcagggcccgctcggggccaggccttcagccccggggcagctccgggccagccaggcggggctggtagacgccaggggccagcagcttcagggtgaactcagtgatgacgggtgtgagcccccagacccggtgtgggccgtgcaggaatacgggcaacgtgtactggaagtgggcaccac

SEQ ID NO: 5618 - DNA, 372 bp, Bos taurus
  Clone ID: 53-LIB34-047-Q1-E1-F10
gtccgaaatgagtcgtattaaatgtaaataatcagatgagatcatctagtaataatgtcactaactatacttaataacatttaattccttctcaagggctgtatatactattctgagctatatcccatgagctgtcttatagatactgatacccccaccaagtggcagaagttaactacatggtgaccagtctctagccatgacaaaaattgccgacattccaacgattggcctcacgggaatggcaactgatcaacctcggaactgaagattaactgtacttaaagaacatcaagatgatgctggtcaggccatcaatgaccaatttcaagattactgtcagaactgactgtgcaattcctgcgtgtaccc

SEQ ID NO: 5619 - DNA, 427 bp, Bos taurus
  unsure (310): Clone ID: 53-LIB34-050-Q1-E1-F2
cagacgcgtgggagaggaggaggtcggtggagacgttggggtggccagcaactagctcgtcggtgctcgtgggcttcgcccgttccgtgcctcgtctctccctggaaggggaggggggcttcgaagccgagcagaagccgccgccgccgtagtcccgggcttgaagtcgcaaagacttctctcaaacttgtgtgctgaggagactcagatgttggcctcagctcctaggctgaactcagatcggcccatgaaaacttctgtattgagacaaaggaaaggatctgtcagaaagcaacatctattatcctgngcgtggcagcaaggaagaggacaggtagtggaaatcctgcaatcggaaaagcagactgaaaggtgacaaagaagctgaagatgggtggtggagagaggtataacattccagcccctc

SEQ ID NO: 5620 - DNA, 243 bp, Bos taurus
  Clone ID: 53-LIB34-051-Q1-E1-F10
catcattattgaagatttgtcttatttttacaactctcaacatttcaccaccttgacaggacatccttttccaatatttaattttccggtcaattgaccatcaattttttttaaaaggaaaatcaattttatcaagaaaatttaaacctaaatccttttgggaaatctccggataattaaaaatttaatttggggtcaaaaaggctaaggtaattaacctgaatattcaatacaagggtacat

SEQ ID NO: 5621 - DNA, 232 bp, Bos taurus
  Clone ID: 53-LIB34-051-Q1-E1-F2
cacaggacaaggacaagccttcttgataagatgcaaaaactgcaaaaatgaggacttctctggtgatttaatcctgttgttacatttatatatgacacatagcatttcagtttgtacttagcattatccaaagaaataatactacatataggcctcttaaaaataacttaggcaaaagcaaatgctatgtgtcatatataaatgtaacaacaggattaaatcacaagacaag

SEQ ID NO: 5622 - DNA, 352 bp, Bos taurus
  Clone ID: 53-LIB34-055-Q1-E1-F2
ttagtaagcaaatgggatagttccaataacagatccatacgataacaagtttaaagggagagtggcattctaacatcatctctacggtgaattgatcagtgccagactgacaaatgacaatccttttatgttctgatatcaatgtaagagtgaccaccttcatgatatacattatcggcctcgttttacctgcgtcaaatacaaccaggagatcagacacagctacataggtcgacagaagttgtgttcaagttcaaattccgtcaatgtactcaacggaagaagaagctcccgatcaataggatcataggaacaatctgacacatcctattatgactattcgaggatctac

SEQ ID NO: 5623 - DNA, 225 bp, Bos taurus
  Clone ID: 53-LIB34-058-Q1-E1-F2
atccagtggcagaaaatttccgagtagaagaagtaaacttaccagattgtgtcaatgaaggacaagtacaagtcagaactctttatctttccgtggatccttacatgcgttgtagaatgaatgaagacactggcagtgactatataacaccttggcagctgtctcaggtggttgatggtggaggtgttgggattatagaagaaagcaaacacacaaattttatga

SEQ ID NO: 5624 - DNA, 76 bp, Bos taurus
  Clone ID: 53-LIB34-060-Q1-E1-F2
tttttttttttttttttttttttttttttttttttttttttttttttttttttttcaataaaaagatattttattc

SEQ ID NO: 5625 - DNA, 208 bp, Bos taurus
  Clone ID: 53-LIB34-062-Q1-E1-F10
ataaaatccagaccagaaggccacttgctccctgccttgactaatggaatggaatttttttgtatctttgtttaaagagcaagatgttgtcattctccattgatcttttacatgctgaatgctgaagatggaggtgaattcaatccactcgggtctggcatatagaaattgacagagtaaaaaatggttcaagttggcttttagatta

SEQ ID NO: 5626 - DNA, 323 bp, Bos taurus
  unsure (71): Clone ID: 53-LIB34-064-Q1-E1-F10
ggggtggccagcaactagctcgtcggtgctcgtgggcttcgcccgttccgtgcctcgtctctccctgtaangggaggggggcttcgaagccgagcagaagccgccgccgccgtattcacgggcttgaagtctcacagacttctctcaaacttgtgtgctgaggagactcagatgttggcctcagctcctaagctgaactcagatcggcccatgaaaacttctgtattgagacaaaggaaaggatctgtcagaaagcaacatctattatcctgggcgtggcagcaaggaacatgacaggtagtggaaatcctgcaatcggaaaa

SEQ ID NO: 5627 - DNA, 250 bp, Bos taurus
  Clone ID: 53-LIB34-067-Q1-E1-F2
gtcgacccacacgtccaggagatttaatgtaactttaatagatcatacagtttctgaatatctgatacaaatttcatgtaagactaggtgtatcaggaaaatggcgaataggtcatgttgaaattcatctatacagcaaggtcgtcagatccgaggtgaagtgtcccaatgttggtgaacgtacaagcttgcactctgtacgccttcgaattacgaaatccgcgcttagccacactagatgacgtcccca

SEQ ID NO: 5628 - DNA, 199 bp, Bos taurus
  Clone ID: 53-LIB34-068-Q1-E1-F10
caaatgcagccctgataaacctgttcttttcctttacagacttgctctcccctagagacttcacctaccatccactctccttactcttccccctttcctttccatcatctcttaaacttctatactgtgctaagagataatctctaaccttaacggtcccactctagttcacacacagacatgagaacgaattacatct

SEQ ID NO: 5629 - DNA, 271 bp, Bos taurus
  Clone ID: 53-LIB34-071-Q1-E1-F2
aggactgttgatgaagtcatccgctttctggcagaagctcagcccccttaaaccttgctggcaacttcttagcgcgccacgccgcgggatggtactccttggttactggtcagaaccagtcacagcacgtcggttttgctcagaatcttttcggtgggtccagggtgatcaggaagtggctgatcagtgctgtcggcagaatcaggtccgctcttgccagggcttcattgtggtgtcctgccaactatacttctagcttgtgatggagtca

SEQ ID NO: 5630 - DNA, 425 bp, Bos taurus
  Clone ID: 53-LIB34-073-Q1-E1-F2
gtcttttgttacccaaactattgcctggagacagttcgatattctcttatagaacaaatcaacggccacagctgttaatttctacaaacgtctcccaatcagtaaagtgctgatagtgattcagatttctatagcatactttagggtagatggtaaatattttaaattatattaaactttccatatgatggattgtaaaccaaaggaaattatacaatttttgagaaaatgtttttattgcaactcattctgaagtatttgaaagtataactccagtcttaatttgtccgtagctaacacgtctatatatgattaccaacgtttggtttgtaatttaaaaattaataaaaagtttaaattttattggaaaaaaaaaaaaaaaagggcggccgctcgcggatctagaacttaaattgcacattgaa

SEQ ID NO: 5631 - DNA, 265 bp, Bos taurus
  unsure (19)...(20),(23),(49): unsure at all n locations; Clone ID: 53-LIB34-077-Q1-E1-F2
gtcgtattaaccaggctannttngtcatcatttgtccatctaggtgcanggcataaacgtcgttattgtactgttctttcatttctgtgtttgaagtttttcaaaatgaaatgttggcgacggctctctcgaacagccactgtgaaagacagattcactgggattccgggggtgttgggtggtgggcacgggagtccggtagctccggctttaaggcatgtccggatgcagtcattctgactcgcctcagcctttcacccctgcc

SEQ ID NO: 5632 - DNA, 431 bp, Bos taurus
  unsure (312): Clone ID: 53-LIB34-078-Q1-E1-F2
tacctttctctacccacatccatgtttgaatgctattgcctgtgatctttacgcttaactgttgtgtatctttttgttctttacaagaagcacagaggggtttttttgtgtagtgcgtgaaaacttataatcagatgttaacagaatggaattttttttcaactgtgtgtagggatgcagtggtgcccagaattagatatctttaaagaattttaaatacaataaacacttcatattattcgccttgttacattcaatgcaattctcaagtctttaagaggtatgttgtgtttaatatttcctcctgtgtangagaatcgcagtcagccataggaatattaggaatcatcactggctgatacatttaaagcagcagtgagtagcaaggacagacacctttaaacagaaacacacagaactgatggaccatg

SEQ ID NO: 5633 - DNA, 236 bp, Bos taurus
  Clone ID: 54-LIB34-003-Q1-E1-F6
atttgtatcatactagagcaagagtcatatcacatctttatctataccctttgcaactccatttttgtatctgggatacaaatatctgtggggagaggcttatcctgagggtataagtacaactaatgtgaacccctcccttcctgatgggggcacagtatgtgtttgcttgaacgttttatacagcatccaataaaatattccatgctcaaacaacaaacaaagaacaacaaacc

SEQ ID NO: 5634 - DNA, 102 bp, Bos taurus
  Clone ID: 54-LIB34-007-Q1-E1-F6
aaaaggattcagatgcgctatatagaccagctcatgcctgagcctaagacctcgcatagcattatgccttctcttcagccaggtgtctaccttggggtttac

SEQ ID NO: 5635 - DNA, 419 bp, Bos taurus
  Clone ID: 54-LIB34-012-Q1-E1-F6
aaaagaaacattttatatgctcctttgaaaatgcaatttagcagtaagtttttgttatagtactatactcggaagaaacacttaatgctaagaaacattttatatgctcctttgaaaatgcaatttaatctagataatctatttttctcccacaataactaatctgtttttagtatcagcaacatttggcaagtttattttttagatataaactgtggttcatctgttcactgtttctagaaaaaaatcattcccatgagaaaaagcataaattcacaagaaaggagagtgacttgatttgcctttagaaaaagaatgctgaattaactatcctgtatttggacttattcaggtgttaagaaacgtagaaagatttgaagggttgaatgaaagcaatgcccctcgggtttttttttttt

SEQ ID NO: 5636 - DNA, 422 bp, Bos taurus
  Clone ID: 54-LIB34-013-Q1-E1-F6
ggaaaaatctggatttccgatgccaaagggttaaagcctcttggatttctttgcggtgatttgcagccactattttatttttgatcagtggcattttggccactgtttaattagggtactgaacatcactgtcagtactagggtttttgtttttcttgggtcttttttggcacatgtgaattttgttttgtatagaacgaaacgactttcttttggtctctgataatgggtttaaaaatcaacgagcatctggttttattgtggggatgatccggattatgttgtgactgatgtatattggttacttgtacatttttttttggatcgttgcaatgcgaaaactacaagtaacgagttttgtataattaaatttgttacacgttttcatgttcatggtaaacaatttttcaaccttgggtgaa

SEQ ID NO: 5637 - DNA, 109 bp, Bos taurus
  Clone ID: 54-LIB34-014-Q1-E1-F6
atctcctatccataggaggactccctcccctatctgggtttataccaaaaaaaaaaccattaaaaaacaaaataaaatataatgaaatttttcaaaaaatgaatgaaaa

SEQ ID NO: 5638 - DNA, 424 bp, Bos taurus
  Clone ID: 54-LIB34-015-Q1-E1-F6
tgttggcttcagaaggttcttggtgatcaccatgtcaaggattttgtttcctgaggtaaagactttctcacagtagaaactattcactaagaaatttaaaaccatcaggactctagatttttttggctatgagaaattaaatcccacatgctgattatctttcctcttctgtatattttcctggaatgatgtgtcaaaccaggatcatttttaagtttttatgtaattttcccttcataatggacttcctctttctaggttattactatatttctgataacacaaagcttataagagaaggaaaacatcacaatggggtactagaataagcaatcttgctccttcttcctccatcatctctaatgaaattttcttaatgtctgtggctcagtcagtatatattttgaaagaatccatggggggg

SEQ ID NO: 5639 - DNA, 407 bp, Bos taurus
  unsure (350): Clone ID: 54-LIB34-017-Q1-E1-F6
ggggatggagagtccgtgggatctctttacggcctctggactggaggccgagcccccgcccgcggccgagccccgcgcccggcgtctccgcccggggtgctctccgcagtttcctggcttggaagcctcgggaacatggcgaggcagcggtggtttaacgggaaggacggtgactgttagcctgtgaacgaaagcgagagtgagccgcctcacgctccggaccaagcctacaaactcctgacgtaaggagtcccttgagggaaggccagaggatccggttgacagcgctgctgcaggaaaacagggtttgggaggattcgctgatcagattccatctcacagatccctgngtgcggctggtccacgggggagacagctgcagagtgatcttgaacttgtggctgcta

SEQ ID NO: 5640 - DNA, 423 bp, Bos taurus
  Clone ID: 54-LIB34-024-Q1-E1-F6
ctgcaaccaagttaacatatattgtctttttaaaaaagtactcctccagattatagcacttgctccttttagcaaaaagaacattgattcttaaagcaattgattctctacaattgtgaatataaatatgctgataaaattgccaagatatttgatgtagaggcaggaattaagtttgtcagagttagctttttactatttttattcttaacaagtatgttaagaggcattcctacttttttccttttgtggtttaaaaaaagacagtaggtagagtataccactgttgtatatatgctaaaagtgggtgaattctagtggaataatttctaacatccgcagacttgttttgcaatggcaaatatttttagaacaccagttttaaatattgctgttgtatcaaacccaactctgattgttttc

SEQ ID NO: 5641 - DNA, 337 bp, Bos taurus
  Clone ID: 54-LIB34-028-Q1-E1-F6
gaaactctttactttggaaaatgcttatccaacaagcccaacaagcagatgtatttagggatttgggataatctaccaggtgttgtgaagtgtcaaatggaacaagcacgtcatcgtgattttggtacagaattggaaccaggaaaagaaataatgctatttgataagccaactaggggaactactgtccagagattcaaagaaatggtctacagtctctttaaagcaaagttgggtgaccaacggaacctctctgaactggttaacctcatcttgacagtagctgatggagacaaagatgggcaggtttccttgggggaagcgaagtcagcatggg

SEQ ID NO: 5642 - DNA, 289 bp, Bos taurus
  Clone ID: 54-LIB34-031-Q1-E1-F6
gtccgaccttccagggtccaggcacgcgtccggacggcggctctggatcgactgcccacatcccactctcgcaggcacacatgaagggacaaagaagttccttcctcctagacctggggctcctgttgaatgcgatttgcaatgtccaaatgaacacccacaaagtatcatattcaacgaccagcatacaccggtggatgcctacaagtcagtctccattaacaccgacttcaccttcagacacttaaagacaatcgcttcatagaagaccaattcaatatgtcatcat

SEQ ID NO: 5643 - DNA, 276 bp, Bos taurus
  Clone ID: 54-LIB34-034-Q1-E1-F6
acggacgcgtgggatttctttggataatgctaagtacaaactgaaatgctatgtgtcatatataaatgtaacaacaggattaaatcacaggacaaggacaagccttcttgataagatgcaaaaactgcaaaaatgaggacttctctggtggtccagaggctgactctgcgctcccagtgcaggggcctaggttccatccctggtgggggaactagattccacatgcggaaactaaaagattctgtgtgccgcaacgaagatcgaagattttgtgtt

SEQ ID NO: 5644 - DNA, 428 bp, Bos taurus
  Clone ID: 54-LIB34-035-Q1-E1-F6
cagcttgcaactcggtgtaactgccatcaaaaatctaaagaggaaaaatgtacatatgctgataaatatacccaaacaccctggagaagaattcctcctcaagtactacagccttccagcagccttcccagacccacagaccacacccagggaaaactagtaaagccacaacataccgaggcccacagtgagtgcacagtccagggcacacatcagggtgttgtacctccagatgaaagctttacacacggctcgcaacaagaaagcagcaatggtctggaagaccagcctttttcttcaagcccgggattcactaaggatgtggtgaagagtatgccttctgaagcaaacttgaacacgaccttgaatgctcaagagccttatcatctggcaaataatcaaatcggtgacatgcaatttgtgcccac

SEQ ID NO: 5645 - DNA, 139 bp, Bos taurus
  Clone ID: 54-LIB34-036-Q1-E1-F10
acacatctccatacagaatactgacgtgatgatggacttgattgcccacatcaaaggggacatcctgtgaagtctatatgtggtactcaacatacaagcgcatgggatctagaagcatgctgtgctgaacctttgttgg

SEQ ID NO: 5646 - DNA, 402 bp, Bos taurus
  Clone ID: 54-LIB34-036-Q1-E1-F6
gtgctgaagcaggaggtgcagagggctttccctctgccagtgtcctatggacaggatgtagacgcagctgtgggggctgctctggtcatgctccagagaagccttagccagcagaagtcctagcacattcgttggccagaggactgttgcaaattttatctaattaacgtccctgacccgatcttgggggtcatccttttcttggacagctctgtgctcagcttttaagcagtgcttgttattggggcctcaagagtcagtcttcggggcacacactcataatgcagccaggaatcatcaaccagatcccaaatcagtgccttctgaaactcacctgagagctggttgcaaatgtaaatgtgagagagagagaaagaaaggaggaagggaaagagaaaggag

SEQ ID NO: 5647 - DNA, 423 bp, Bos taurus
  Clone ID: 54-LIB34-039-Q1-E1-F6
cggacgcgtgggtaattggagggcgccctcccgccgccccgcaccctgcctgttcccctctggccatgggacgcggggaaggtccactgtcctggctgacttgcgtgcctgtgggggcccggaagtgcccgcgggcccaccctggcccgagtcagctgtgagccctgggggctggactgggccagggggcgggggcctgggcgtgggaaggggaccaccccccacccggctcctgggcgcatgggggcggccgctgctccctgacggctcacccgacgttcggagggcctctgtgctggacgtctgttcagacgcggagtctgtgggcgggaaacatgggtcttgacggcgctgggccggagctggtcccaggcggtgcctcgcccgaggccccagcaggaatggcgatccgggtccccgcag

SEQ ID NO: 5648 - DNA, 425 bp, Bos taurus
  Clone ID: 54-LIB34-040-Q1-E1-F6
cagacgcgtgggcggcgtcccccttcctctgggtgtccctgtttgctgctgtcagggcacagtcctcaagatgttccaccagggggaatagaagccggaaccagagcctctaagcctgtccccccagtgatggggcccccaatgagtcatctgctggctggcctgtgtgtgtgggtggccttgggccaggtggagggctcagccccctacctgggccctgctgagcaggaacagaaccattacctcgcccagctgtttggtctgtatggggaaaatgggacgctgactgcagcgggcctaaccaagctcctccacagcctgggactaggccgagttcaggcccttcgcctgggacaccacgggcctcctgctggtcggggtgcgcccccagcgggagacaatccacacacaggccacaggacccc

SEQ ID NO: 5649 - DNA, 231 bp, Bos taurus
  Clone ID: 54-LIB34-044-Q1-E1-F6
attcgccggtcgacgcacgcgaccagagtaagtcttgtaacgcgttagtacagatgaatctacactcgcaccagagatttcgactggactttaaggggcacatgatttgggaacgtgtcgctgagatcggtcaatttaaacatcttgcgaagtatagagcctagaagtaccatgtgcattaatatctgacaagatgcctaggaatttgttttgctttgaggcttagaggaa

SEQ ID NO: 5650 - DNA, 258 bp, Bos taurus
  Clone ID: 54-LIB34-045-Q1-E1-F6
ggtcggccaggcgtattcacggcttgacgatgtatctgggctgctagtcccgcccgcgtcattgttgcccatcacgaggtgctctgcgctagtcattagcagaaatatggtcgatcatcagtcagtgcaccagagttagagtttctctatgaaccctgtactccgtctactgagtattgcttggggatgtcatccttctgaagtcgtgttctgatcggtcagggtactgtcacgaccaccgacaggttcagacgaaca

SEQ ID NO: 5651 - DNA, 326 bp, Bos taurus
  Clone ID: 54-LIB34-047-Q1-E1-F6
acttaatgcgcacggtgggactcgccactgcacgttgcatcacgtatgcctggaccaagccaggagagcacagcgccgacttctctgtgccaatgtctctgtcacatgcgtgtcacgcctggtcggcggcacttgatgcttacgcgcagcacaccatgaccatgggggtgcctatgaacacgtcagttatcgcagagacagtgatcttcttcatgtagcgcaagtcctccaatcttgtcacagtttgcaagtccagggactgtcgatccgatagcattctccacggcatagtgctcgagctggtaggcattcgctgcaccacagga

SEQ ID NO: 5652 - DNA, 297 bp, Bos taurus
  Clone ID: 54-LIB34-048-Q1-E1-F10
tcatcagacaacggacgctctatgggattcacccatactgtgtcgcggatgcaattccgactttctgcaagttcgtcaactgggatcaattcacaggacgtcgatttacatccttgtcactactactctgctgatgtgcacgagaatctccgctctgcagaacagcctccattcgcaagctcgggtcatagccaaaatgtacgtgctgatcacccttctcaagaattacgcagtcagaatggcgcatggtatgcatcctgtaccggtccatcaccctcagagaggataggagataag

SEQ ID NO: 5653 - DNA, 236 bp, Bos taurus
  Clone ID: 54-LIB34-054-Q1-E1-F6
gaatccatcaggcaggtacacgacttggaacgagaattcttaataaaactaggcctcgtaaatgataaagactctaaagattctatgacagaaggagaaaatcttgaagaagatgaagaagaagaagaaggaggagctgaaacagaggaacaatctggaaatgaaagtgaagtgaatgagccagaggaagaggagggttctgataatgatgatgatgaaggggaggaggaagagga

SEQ ID NO: 5654 - DNA, 100 bp, Bos taurus
  Clone ID: 54-LIB34-058-Q1-E1-F6
caggtcgacgcaagactctatactgagtcgtattacaagtcgatacccctggatccagaggatgttggagtcctcgtgtctggaaatgaccgacctatta

SEQ ID NO: 5655 - DNA, 198 bp, Bos taurus
  Clone ID: 54-LIB34-059-Q1-E1-F6
agcccctttcattatgaagcatgcagtgttatcggagagcaaggacggcctgagtgtatatgaagggagacgtgtgttgcaggtattcggtacgtgtatcacctcagatggcaaaccggattgtggattctgcaaggagcatcctcaacaagtttatacctgatatctatatttacacagaccacatgaaaggcatca

SEQ ID NO: 5656 - DNA, 238 bp, Bos taurus
  Clone ID: 54-LIB34-060-Q1-E1-F6
gcgagcggccgcccttttttttttttttttccgttaagttgtaggaagttaattcagcttaccaacatgtgagcaattaggaaatcatgacccgattaaataaaacgatagtgctcaaaattcgaagcagtgtctacacacatatcaggggcatgcactgcctctactgactactaaatatgagattggacatctgcatatacacatcacgcattggaaatcaatgcctacaagtctt

SEQ ID NO: 5657 - DNA, 186 bp, Bos taurus
  Clone ID: 54-LIB34-064-Q1-E1-F6
cccacgcgtccactagttcaagatcccaagcggccgccctttttttttttttttttttgaaaaagtggaaaaacgactttaatagacattttttcagaaaacatacacaagggactgctaagcactaagcacatgcccaacatcctcaaggaaatcaaagccgcagcaatacattaactcaaatca

SEQ ID NO: 5658 - DNA, 250 bp, Bos taurus
  Clone ID: 54-LIB34-066-Q1-E1-F6
tcggcatgcggcatggaggttgagtgtcaggacacgaaggaaacaagtggatggtaggtcatgcttcagtcccagtccctgaacgccggcgaacggataggacaaatgctataatggtcaattggtaatggccaattaaatagccattcaagcctaagttgtgcacattcccatttagcatgtccactcgatgatgctatttggctaacatctgagcaggagtgtacattgtagtacaaatggattattt

SEQ ID NO: 5659 - DNA, 383 bp, Bos taurus
  Clone ID: 54-LIB34-071-Q1-E1-F10
acccacacgtcaactttacggtatatgatcattactcaggctatgatttttccgatatagatacttttcctcacctaattattaggactcacttaatgggctcttgctacggttctctggtccaaaatggttatacagtacgctgggctcattttatcatgcatataatttgatcaattgcacatagtcaggagtctatcttttaactcattcattacagttattcatatttaggcatttgtatcatacccgaattcatcacctctgtacattcaactcctactcagaagggttctagttcagttatgttatgtgtaaattgttacccggtttaccgatatgatgcctttaagattggttcgcctcatgatgccctctaggta

SEQ ID NO: 5660 - DNA, 153 bp, Bos taurus
  Clone ID: 54-LIB34-072-Q1-E1-F6
agtagatcagtgcgccaacatctggggactatagttcaaatgcggagtgtctgctagtcacgacgtcatccggagtgttgacatgtaagttgaggagttcctactaccatccgtcctgacaagtgtcaggcagacttgctgcatatgtcattt

SEQ ID NO: 5661 - DNA, 103 bp, Bos taurus
  Clone ID: 54-LIB34-075-Q1-E1-F6
aagcactacttatccaatcgattgtttttgcctgggaatgcaaagtcaggtgaaccgtaaaggcagatgttgtcgaggacactcaatcggagataaatcatca

SEQ ID NO: 5662 - DNA, 387 bp, Bos taurus
  Clone ID: 54-LIB34-076-Q1-E1-F10
aactgagagtcaaccaaatgggacacccatgctggaggcattctgcgacttggtggtcggccgctgcactacgctccgtcctggcagagtccgacagagggcattagtcaatccactccatgcgtacttccccagaacgtagtaacctaaacatgacacactatggtgcatactcatgcccttcatacgtatcttctcctacatttcacttcgagaaatgtatcctggatcctcagcagattatgaatgcatagtgtaacgtgatgatgcctaatttagctctagaacagtgaaacttaaggacaggattgcccgaggtcataaatccactagccagccagctgcagtacttagtgaaccatgtcatgatgactcttcacttacata

SEQ ID NO: 5663 - DNA, 282 bp, Bos taurus
  Clone ID: 54-LIB34-082-Q1-E1-F10
aaagatttggttaacattccgagattcattgctttaaattttttagtcacaacattacagacggatgtaatgtgtaatgttgctacatgcctgtctctgtgttagtttctcgctttctctctctctagatatacgtgtaactttttgcttataatcctcttaagagactatgttacatttcttaaagatggattacatgatttcttcagtatgaaaaacttttaaaatattttcttgttatcattttgactctgtagaacaaatcagtttttatcactggga

SEQ ID NO: 5664 - DNA, 410 bp, Bos taurus
  Clone ID: 54-LIB34-085-Q1-E1-F6
aggattttgtgaagcaggatttctgttccaaaaggaagagctaaggcaagaaaggaggcggtcagaggggcaggtaggtgttgattgcttcaagattcagatggaagtctagttctcgctgaccagctccagatgtgatactagagagctgagccccttcagacctcgtccctcgtactaaaccatatctttagagaggagacttctcttcttaccagaacattccattgatgtaagggctttctatagaaaggctttcacttttgggctccttgagtttaaaggatgactttttatgagccactctttgtttttctcccttaatgtagaaaacattgtaagtatacatatgattcctaaaacagtagaagcgagttcattttgaataccatgaacagattgaatgtcac

SEQ ID NO: 5665 - DNA, 440 bp, Bos taurus
  Clone ID: 54-LIB34-086-Q1-E1-F6
cggacgcgtgggtcgcttttctctgaattcttgtgtcttatttctcattctctcgccgtattgcgctttcagaaaccctgcttgtcaagcgtgtctcgacaagtggtgccgaaatagggacccgaaagtaaatccagcctgagaagctagttcctagccgaggtgaacgtagggaaatctggccagctaggcggaagaggaaagtacttggctctggctcaattttttctgcgctgaggcataaggaacctgagctatttggaacccctggaaagccatctagtggtgtccaacctgataccatctgcctgggagcatacaaaccagtcaactttcagtttctttcaggccaagagcatcatgcacccttgggtagccatcctgggcctcctactccttctgacagatggtgtaacctcttattctcaagtgactggaag

SEQ ID NO: 5666 - DNA, 358 bp, Bos taurus
  Clone ID: 55-LIB34-003-Q1-E1-F12
aattagcatctgctgccgcgcgattcaactaacggaacgaatccccccgcgaacgtccttctgtccgctgaaccaacgggaaacacctggctctgggcgctgtatccggggccacagcaaaccgatggcaacaacagcggccctgtctggcgtagcaatgcggctgtcgcgctcagccactaaccgcggctcatacagcgccttctgcaaagggctcacgcgcacgctgatcaccttcttcgacctggcctggcgtctgcgcatgaacttcccctacttctacatcgtggcttcggtgattctcaacgtccgcctgcaggtacatatttagagcaactaactttgtggcagtacggag

SEQ ID NO: 5667 - DNA, 306 bp, Bos taurus
  Clone ID: 55-LIB34-009-Q1-E1-F4
caccagagctaggcgcctgctcaccatggacactgctgggtacagcaagtgggacggcaggctggaagaggtccccggagggcacttgggacgctggggacggagaccccttttcctgctcttcgctctcgtggtcatcacagtcctgtgggccctcattctcagcgtcctgttttccaaggcgtccaccgagcgcggggcgctgcttgacctccaagacgggctgagcgcaaacgcctccaaacagaccgcggtgctgggtatcttggaggaagaagtccgaacgttcaataactgctgcctgaa

SEQ ID NO: 5668 - DNA, 367 bp, Bos taurus
  Clone ID: 55-LIB34-011-Q1-E1-F12
cggcgaaacggcttggcagttacagcagcagtcgcacagaatggtgaagactcctcctccgtaccaacaccagcagaatctccagtgcataggtggattacgccgcagatcggttgagcgagaaatgtcatatagttctgcactatcaactttcaggtggagtagatgtcactgaactcctctggcagcaagctgtcctgtcaggtaacagcataaactcccacccctctgtcttccagcacatgtactacataaggtgtgcgtttatcgggcactccgccacgtggctcgtttccagaaggtcagatgcctccagcttcccaagctctcccacaccctctctgaagcgctcgccatccagctcccg

SEQ ID NO: 5669 - DNA, 390 bp, Bos taurus
  Clone ID: 55-LIB34-014-Q1-E1-F4
cgggtccacgcacgcgtccgatagatttctaatgaagaatgatacagtttggattaagtatcttggactgggtttaaacaagtgctttgtcctggatctgttgaagcacctggccagcttggtatcctgtgaaacgtttgttattttctgggtagagattcttatatagtactgtctttaaaatcagatcgtctcttcgatattgacagcatttttatgttttctaaattaaaaattaatattttcttacagatattgtgcaataaagctgaggtaggatgtgtggtttttgcaaatgctttaacagctgataaaattttacatttgtaacattaatatattgtagtggtacaaaatacttttaaattagattttagaagaacagttatt

SEQ ID NO: 5670 - DNA, 235 bp, Bos taurus
  Clone ID: 55-LIB34-019-Q1-E1-F3
cagacgcgtgggtcctcagccactctggggagccgacctctccagaagccttcctcagtggtgcccgtggtcccagcccaggggctgtgcttggaaaacaactgttgcccttggctaacaaccgcgggccgttcccaacaacccagcaaaattccgttccgaaaaggaaatttttccaatccacaattatttgaaacaaccaatccggggttttttcctttttttttcccttggg

SEQ ID NO: 5671 - DNA, 389 bp, Bos taurus
  Clone ID: 55-LIB34-024-Q1-E1-F4
catggagtcgtgttagtcccctgatcctcgcttttctctgaattcttgtgtcttatttctcattctctcgccgtattgcgctttcagaaaccctgcttgtcaagcgtgtctcgacaagtggtgccgaaatagggacccgaaagtaaatccagcctgagaagctagttcctagccgaggtgaacgtagggaaatctggccagctaggcggaagaggaaagtacttggctctggctcaattttttctgcgctgaggcataaggaacctgagctatttggaacccctggaaagccatctagtggtgtccaacctgataccatctgcctgggagcatacaaaccagtcaactttcagtttctttcaggccaagagcatcatgcacccttgggt

SEQ ID NO: 5672 - DNA, 351 bp, Bos taurus
  Clone ID: 55-LIB34-030-Q1-E1-F4
agcattttcaagaagagaggttctctaataatcacatatatgcatacgtaaaaatggaccacggggacttacttgtagctgttgccctgctacttagtttgttagagcattttagcacacattttaattttctcctctaattaaaatgtgtaatattttcagtgtcatatttaactacttagagtatgatttccacctcgatgttttaatattctaggcatctggtgtaatgatattttagaaactgtttggaatttaaggaaataacttgtattactaaattgtataatctctacctgtgcaatggaatataaatatcacaaagttgtttgacgaagaacgggggtagcg

SEQ ID NO: 5673 - DNA, 431 bp, Bos taurus
  unsure (374): Clone ID: 55-LIB34-031-Q1-E1-F4
cagagacccgacatcacctatgtgcaccagattgccaaacagatgcacgtgtggacttcaagcacctgagcgtggatgcagcgtgccttctcagaagccacaccttacctgccttacctgagtcttctccaaagtggccacctggtagctgggaccaactaagactagagggttcagcacgttccccaaagaggggcccaggcttcatagcagatgctgaatacagggctgctggggggaggggcactggtcatgtgttactggtggtcacatttgaaactcctttctttaaactgttgtgaacactctcagctgggttgccacgggtggatggttcagtgagccactgacacaccccttatatctggactgtnatgtgaatctttcgggtaattccttcagtgacctgtcaaagtttgtaataacaggag

SEQ ID NO: 5674 - DNA, 362 bp, Bos taurus
  Clone ID: 55-LIB34-035-Q1-E1-F12
aaacacaagctggagaatcgaactccctactaaaggaacgggctgtgggaagcgacgccggcgtctttgattgtgcaaaggctttcctcctgcctgcagccaatcccctgccctcaaaccaagattgttggggcacaaggttggcaagacgggccttccgcgtgccctgatcccttcttagaaggaggagaggacaggacagctgcttacccgatggccatccgctgggacataccaggtgatagcagatgagggcaagaccggcaggggagcgagaaattgctatttctcttcctcccccaccccgagagcgatgtagcttttccttcagtgtaacatctcctcccctagaatcatccata

SEQ ID NO: 5675 - DNA, 438 bp, Bos taurus
  Clone ID: 55-LIB34-039-Q1-E1-F4
ttcagattcagtatgtaaagccagcttgctaaatgggcaggttacaggacaaatgtcaccagcctcaagtactctgtgaactgtttactcaaggtaaagttactgttcagtatgttacgtacgacgtggtcagtaccttatttcctggaatcctcttcacagggaagaacaccgaagcttagagaaggggtgaggaaaagggacatctcgttgaggactggacgtaggacacaagaatgtaacgccagactatgaaacacagaaggattttctgctactggaaactgcctttttacaaaaggattgttaatgtttgtaaaataaaacaactctaaatcttaggctcaatgggaaagctagagctgaatattagaccctggaagtgcgtcagcgagcacactaacccgggtcacagaatgatcactgtaatcagaagtc

SEQ ID NO: 5676 - DNA, 252 bp, Bos taurus
  Clone ID: 55-LIB34-040-Q1-E1-F4
gaaatgctcaggtccaggtttgtgtcacagctaaagtgctgtccccaatatctgctaatcttactgatgaaagaggtctttgcccttcccaacaggaaacaaaagatgacttcctaggctcctttttctacgcacaatgacgactgcatcctggacatccagtctcaatgctaatcataccttgcaacggatattcaaccacagtggacgaataccgttcctaatatggttcataagcatgagaatccacaa

SEQ ID NO: 5677 - DNA, 162 bp, Bos taurus
  Clone ID: 55-LIB34-042-Q1-E1-F4
cgggtcgacgacgcgtccgattaatttaagatagagagagaacacagaagtgccctgccagcatgcgttttttgtggggacgagggctggctaccaatgcagtatcctgccctgtgcgctgtccctcagagatgcttgtcccgtgccccgagctccttccga

SEQ ID NO: 5678 - DNA, 377 bp, Bos taurus
  Clone ID: 55-LIB34-044-Q1-E1-F4
agtctggtgaaatcaaggcccgaagatcaacggccgtccttccttgagtcccttctacagccagagtctttaaggttggattggctgctgttggctgtgtcccatgatgctcccccaagcaccagcactatggatgatgaaggaaaccccaggcctcattctcacttgttttcctggggttacagtcagctcatccttcatctgattaaacttcctgcagattttacaacaaaagagaaaatgactgacatctgtatgtctcatggtttctggcctggatatcttattctctgtttggagctggagagaagaagagaggccttcaccaacattgtgtatctgaatgatatgagcctgatggaaggggacaatggttg

SEQ ID NO: 5679 - DNA, 389 bp, Bos taurus
  unsure (293): Clone ID: 55-LIB34-046-Q1-E1-F4
actagttctagatcgcgagcggccgccctttttttttttttttttgcgatagcaggtgacagcgtgattatcccaaagtgccccagccagcaggccagctgtcccatggactctgcccaaggtcagggctccagtgcagaagatgcagttgccacggtgttgggaaaggctttattcagtcctggagaggagccggcctggccgggcagaggcagggcccgctcggggccaggccttcagccccggggcagctccgggccagccaggcggggctggtagacgccaggggccancagcttcagggtgaactcagtgatgacggctgtgagcccccagaccgggtgtggcccgtgcaggaatacgggcagcgtgtacgtggagtggcacca

SEQ ID NO: 5680 - DNA, 420 bp, Bos taurus
  unsure (381): Clone ID: 55-LIB34-048-Q1-E1-F4
aaagaattaaaataaagcttgtttctctttaataccttgaatttttatttgagaagagccatgctgcaattttatattgctactgacactgcatataatttgtctttgttttattacaaaatgaaactttatacttttctgatatcctttctctaaggttgacataatttgatagcttactataaatttcatagaaagtcacttttaaatgtacaatagtgattaacttatgaatcatgttttcacaagtattgacatcattttagtttatcaactaacagaaactattttaccttttttcacttttaatatttcagaaaaatatgcccaaattcaacaaaattcctttctacctccaacctcatgcatcttcaggagcanaaaccttaaaaaaggaccgactttctgctagtgacatgc

SEQ ID NO: 5681 - DNA, 244 bp, Bos taurus
  Clone ID: 55-LIB34-050-Q1-E1-F12
catatacctaaaccattgtattttcctgacctttctcctgggtcccttcctccaatatctgagtcacgatcgaaaaggaacccgagtcctgcgtgcgggaaagttgaagcgtcctgccagctggtgtcctcgtggttgccttacgaattcacgggctccaggaggtttgaacggaaggcggtcgaccggcactttattcaatcccagaaaggacctctctaatcatgtgactgagaattcatcc

SEQ ID NO: 5682 - DNA, 439 bp, Bos taurus
  Clone ID: 55-LIB34-050-Q1-E1-F4
cagacgcgtgagggagcagctgacacaggacccagagctgtttgaccagatggcccaagagttcaccctccagtttggagtggaccggccctcctaacccagcttctgagccgcctgctttctgtgtgacggatggacgcccctcgtggatgggggaccagagcctctttgcgattttgcacttgctcatgtcttccaagatttccttcttaggttgcatgtgtgtgtacggggaggggactgccattatgagtgtggacccactggccacagatgtgctttccccagcccctttctctgccccggagccagaggcatttacgtttgcagactcaaaatccagctctccagtgctccgtgatgggggttcctggtcccaccgttggtccatcttagagactcaggccacctttccggccagatgagcagccaacccgaa

SEQ ID NO: 5683 - DNA, 233 bp, Bos taurus
  Clone ID: 55-LIB34-051-Q1-E1-F4
gcaggatgtgcagagcactttattcagtgcatagctttaagccagtattggattcactgcgtggacagccaaactcccagctctctgccatccctcaaagggtcatagtaggttcacattgctaccacagttgagtggactcctggctaatgggatccagcatgccattctcctgagtgccattgttctgtcaggggacttcttggaattcttagcttctacttggagtggaa

SEQ ID NO: 5684 - DNA, 241 bp, Bos taurus
  Clone ID: 55-LIB34-054-Q1-E1-F4
gttctagatcgcgagcggccgccctttttttttttttttttttatttttaatactttaatttcagaacaaaataaacaaaaaaaacacaacacacaacattcaaaccccatgtcaaacgtggagagagagagggcttgaggtccatgtatcctgccttagaaggacagaaataaaaccactagacatcagcagaggaaaccatgtgggccagggccactggggctgctgctgcaggagcca

SEQ ID NO: 5685 - DNA, 307 bp, Bos taurus
  Clone ID: 55-LIB34-060-Q1-E1-F12
gtggcacagtcagtgacagatgcctatggcggaatggagtgggaactgggcactcagcaaagtccctgccgccaccaggggcgggatcgacgatggctgcagctcctctctatggagccaggggtggcgggccccgggggttcccggtgagcacacgggcggtcacctgtccagccacgtgggctccgaatggtctaagatgttactctgtgttcaacgtggaatgttgattgtgacttaatgtacctactgcacacttgttaagcatgtacgtacattaacgtttcatgtgacagaaatttttacc

SEQ ID NO: 5686 - DNA, 239 bp, Bos taurus
  Clone ID: 55-LIB34-060-Q1-E1-F4
actttgcgtctcttcaagcctgtgtttaaggactaaccactttgcccagaaattgaaaagcccgcttaccaaactggccgcagttagccgaggaggccccgattaagtagaggacagtgctcagaagtctaggcagtgtccacaaaatatgaggggctgcccctctgtgctgctgctatacctgggattggccacctgcctggacacttcacccagtgggaagcaaggccgagaggtct

SEQ ID NO: 5687 - DNA, 412 bp, Bos taurus
  Clone ID: 55-LIB34-061-Q1-E1-F12
cgacccacgggcccgcagtgatcacaggagatgccctatctctgtgccatatcacactacaaacatcctctgtcactctgatgatgatgccaactaatgactaaggacgtggatgtcttactgcataaatgctgcttcatgttagcctgcagattgagatatgatgatcacaactcagtagagtttcggcgatggcgaagcactgaatcctggtatagtaaccacaataggaagatcctcctgcacacctactcacgagatcgaacacaatctatatatatatctatatatatatatatatagggatatatatatctataggagagcatgggtcactctacctggtggggaaccacggttaaaacacaggggtgatgctcagtctacaatatctgtgaatccagtatcctta

SEQ ID NO: 5688 - DNA, 419 bp, Bos taurus
  Clone ID: 55-LIB34-061-Q1-E1-F4
acacacacccgcccaccaacacctaccctccacagtacggtggctatggggccggacaaagcgtttttgccccggctaagcccttcacgggccaggactgtgctaacagcaaagactgcagctttgcctatggcagcggcaacagcctacctgcctcacccagcagcgcccacagtgccggctacgccccaccgcccaccggtggcccatgcctgccaccaagcaaggcctccttcttcaacagctccgagggggcccccttctctggttcagcccccacacctctgcgctgtgacagccgggccagcacagtctcgcccggtggctacatggtgcccaagggcaccacgggctctggcaacttcggcggctccttcgtcgtcctcgtccttccacccctcacctgagaactgtcggca

SEQ ID NO: 5689 - DNA, 194 bp, Bos taurus
  Clone ID: 55-LIB34-062-Q1-E1-F4
cgtgagtccgctgccccacggctcgatgactgatggggctcgggcgcgcgacgcggcctgggaggagccgcccccgccctcctcctgcctagctcccgcccgccgcatgctccaccggaccgcgccgcgcgctctttctccgacagctgccagggagcacagttcgccactccgcgtcctgccccgtctgtccc

SEQ ID NO: 5690 - DNA, 239 bp, Bos taurus
  Clone ID: 55-LIB34-067-Q1-E1-F4
cactctcctgcttctggtgaggaatcacctggcggcctgtcacccaggagtgtgtggggtgaaggtcaccttctaggggagctggaagcactctatccacaggatgaatcgctaatggtggaatgtcagggacaagcaggattatttcctctagctgaaggtggtggttgttattcccgagtcctgaagaagtgggcctgggaaagggcttcatgaatgcaagtaggactgggagggga

SEQ ID NO: 5691 - DNA, 196 bp, Bos taurus
  Clone ID: 55-LIB34-068-Q1-E1-F12
gtatgacaaaccattgttggataatgcccagtgcaatgtagaagctcaacagtgtggaatcgccatctgggtgctctcattaagtgatggctttgtctctgactacgatatttgcagcaactataaagaacctaaagactcctgcctgagatgtggtttgtataataactcactacggcatcatgaataggcattt

SEQ ID NO: 5692 - DNA, 386 bp, Bos taurus
  Clone ID: 55-LIB34-073-Q1-E1-F4
gacccacgcgtccacctgaccactgtgtccatcatgtcaccggtgggtcacttgtcactttgcccagccatttttttttcacagactttaactcttcctgctactgtgtgtctatgtgtcagtagtctcactgcccacacttggggacataccacgtgggaacagacaaccagccagctttcgctcgaaagcctgtgttgtgctaagcgtatcctttccagctgaccaagttcagagctaagtgtttagcgcattaacgatttcgaggtcctttgtatgcctgctgggttacctggacagaatgccttgatagtctgtgccctccttactgtaaaacacacaccttccatcataagcacgacgatcctaatgacgtacgctttcta

SEQ ID NO: 5693 - DNA, 447 bp, Bos taurus
  Clone ID: 55-LIB34-074-Q1-E1-F4
gggccgacccacgcgtccattttactccagatacctttatatttctattgtatttttagttgtgtactgtgtgctacagatttttttaagtttattacaaacacaatttggtaattcctaaattggttctgtctgcctccaaacagaaacacctgtacaaccttactaagtataaactactttctggtaaaacggtcagaataaaatgatgtcatgttttcctgacacacgtgagagggcatacggtattgttccagcaaatctcactgtttggcatttgatccagtatttctagtattcagtaacgtatgttttttcattctaatttgggttggtttaaaagctatgttacaagataggcatagaaaatgtgggtgtcactcctgtttgcctcttgatcagaaactttagcagggcagaaaagaagtccgagtgattcgaactgaa

SEQ ID NO: 5694 - DNA, 402 bp, Bos taurus
  Clone ID: 55-LIB34-079-Q1-E1-F4
acagaacaaggtccgcgaagggctcccatcctagtccgagggtgactgcatggctcttaggattttctgtgcccgcacgctcacgtgtgaaactcggttttctttgtatgaaaatggttctccacatttctgcttctttcgcacaaacgcgccctgttctttcatgactgtgattcgttttcattctaaaatagataacaaaaaacttgctgttttatccatccttaaatgtacacctcgcagcggtgcgctcacagtgttttcatgtgtctccatgcggtttcatcgccccaaacagaaactaagcctcaacactaactccctacctgggccccgcccggcccccggatcctggggacctttattccactttccttccgttggcaaattgaatataataat

SEQ ID NO: 5695 - DNA, 387 bp, Bos taurus
  Clone ID: 55-LIB34-082-Q1-E1-F4
acaattagaacctggaatccagcaaactgaatttcgcgaatactccttggcttaattggcaaaactaaaggagccttacagaccctaataaaactcctggatttccccaatctaggtaacaatttacaaaaacaagtttcttcatgtttcattataaatgtccattggtgatctcacttgcattcacgattaccagccaacgtgcaagcattaagcttcggacagcctcacgtccaagattatatgacgaatgattcacgttatcctgggaaatggatgctaactaacgtccccatccatgaatcatgctagtataaatgcctaacttgaaactatgtagtccaagacatcagcgttaacgtttaacccactgtaaataatgagtac

SEQ ID NO: 5696 - DNA, 303 bp, Bos taurus
  Clone ID: 55-LIB34-083-Q1-E1-F4
gcgtcggatccaatgccaaccggccgcccttttttttttttttttgttttttttttttttttttcttcttttttttcctattttaattttttttatctggttctattatatttgggagtactgggactcttattccatcttggaggaagccatatactgaattgatatcattcaacgcagttataaggtacacctgatagccaataaagatatttaaaagtggtttttaccttggtcaaaaaggacctctaggagactgtacttatcactcagcagagccatgatgagcaacggcatgttcta

SEQ ID NO: 5697 - DNA, 335 bp, Bos taurus
  Clone ID: 55-LIB34-086-Q1-E1-F12
agggccagctcgaccagcgcgcactaaggggacactgcacctgacaccctggacagagcaaccagatgtattcggagtgacatcagagcgctcagtgaaggaactcgacgccaggcagtacattgacagtccgtttgcacagcggccacaaacagtcctttttagtctgtgttcaagggggaactgatccatggcaacttttgtggcatagcagtcgatgccacttggaaaccaactagcaaggaccatttgagaactcaacactgtctaacaagcttctcagaagatgtgtcaacatattcggatcagcgtttccacgacttcgtagcactaaa

SEQ ID NO: 5698 - DNA, 275 bp, Bos taurus
  Clone ID: 56-LIB34-004-Q1-E1-F12
cttttctgtctagcaaagtatggaggagaacgattccacacgcgagcgacatttcgtccgctaagcctacaggaatcattcgactctgagcgatgtgacgagggccacaacatctagatggcataactataggccctgtagggagtttcagtggagatgtagctgtaatcaagtaacccttgtcaatatggagccttctgcatagggcacaagcacatcctgatcatcttattcgacctgacctgccatctgcgcatgaaattcccctacttcga

SEQ ID NO: 5699 - DNA, 409 bp, Bos taurus
  Clone ID: 56-LIB34-008-Q1-E1-F8
gaaataaagacttacaagatctatgattttgccttcaaggagctatttgtctagtatggaggaacatatactgatagtttattattcttatacttcaaacaaagaaattaactcccagattaacatgtataaattttgccataaatagttgtgaagagagttactgtgttttcctaacaacaacctaagattaagggttggcaattaaacattaaaagcagattttatagccaatatagaactgcctactaccaactagagcctccagcctgaatgtctcaggttgctgatgttctcgcagatgttttatagagagaatttttacattggcagtaatattggatgagataatctcaatcgctatcaatttttaggattatggtgaacaggaattaaatcagaatatttc

SEQ ID NO: 5700 - DNA, 319 bp, Bos taurus
  Clone ID: 56-LIB34-009-Q1-E1-F8
ggtaaatttttagcttactccctgacgactttgaactgaccagccatggatgcacatctcccaggaggcaactaaattcagctggaccttgacacccatcacagagaaggggttgagatcagcatgcatgacgaaaacaacggtttggaaagtaatcttctgttgtctttgaagaacacgcagttttatcactttccctacgttgtgaggcttgctggtgttctgagttggtgttaattcacctgggggttcccaagaagggcttcctttggaaacaacttaaaattttggtttggtttcctaaatgttcaacctcctt

SEQ ID NO: 5701 - DNA, 348 bp, Bos taurus
  Clone ID: 56-LIB34-011-Q1-E1-F8
acgagcttgttcacaaatgggaaaaactaggtggtcagttgataattgatctctggtataagcaatgtaattctaagttaaccttggatttgatagtcatagacatttgcagaaactgagtaattctgtatctgataactaggcttttataataggaaaattaatccagctgaaactggtgaaatcacaccagataccattctagaagcctttttttatgaatagaaagcatccatgtgagctgtacacagatggattaattgcagtttttcctggataaaaataatttatatggccattggtacggactctaaaatgacaatcgatttggtccctagcttgttccgt

SEQ ID NO: 5702 - DNA, 354 bp, Bos taurus
  Clone ID: 56-LIB34-014-Q1-E1-F8
cgactagttctagatcgcgagcggttggattaagtatcttggtctggttttaaacaagtactttgtcctgaatcagttgaaacagctgttcaacttggaatcctgtgaaacgtttgttagtttctgggtagaaattcgtagagagtagtgtctttaaaatcaaatcgtctcttctagattgatagcatttttatgttttctaatttatgaattagtactttcttagacactattgtgcaatagagctgaattaggatgtgtggattgtgcagatgatttaacagcggataaaagtttacatttgtcaaattaatatattgtattggtacaaaatagttttaaattacattttaa

SEQ ID NO: 5703 - DNA, 436 bp, Bos taurus
  Clone ID: 56-LIB34-022-Q1-E1-F8
gaaaaatggaaacactcaattgagacttgagggaaataatatgaaatgaagatggatccccagtattctgaaattccaaaatagcattaaaaaaatcccttctgtttcttgcatgggatcagtacttaatcagttagtacttccgagtactggttcaatttagtacttcaattagtattaatcttcagtgaaaagtaaaacataactcaaactgtatattggatggcattttgaggtcctaggacataacctcttaaaaataatagtagttttgtagagtacttgaattactgatgttataattacagtcaactctagaatatcagctccaattaaaggggaacatgacagacgtaaccataatatcatttttattttattttaaacaccaatatgtctgaaatgctgggaatttgtagtacttttaactcactga

SEQ ID NO: 5704 - DNA, 317 bp, Bos taurus
  Clone ID: 56-LIB34-024-Q1-E1-F12
gtcgacgcacgcatctggactaaggcatataagcgtctctgtgcaagccttcgtcagcgcggcctccgcccccgtcgcacctgagcccctctgtgcctggctccttcgaagccaccgtgacaggaggcgcagtttcatggctcgcggccatatgcaggagagacggctttttttgtcgtgacccaatgacgacactcgtctctggaatgtcttaaagagtcctgttgacagagaaatccattggttcaaccagggcagtcaggtacgtccagctacgacggagttggccactggcctggccttcagtaggggcttcc

SEQ ID NO: 5705 - DNA, 418 bp, Bos taurus
  Clone ID: 56-LIB34-031-Q1-E1-F8
gtgtttataagatggttggacctgggaaccctgacaactgtctacacaagtttgaaaagcaaacaattttggtctctatggccatacttgtggtttctcttatcagaggtgcccaagccctgtagggaactgagggaccctcattatctcaggagcctggacctgatacagaggggctagaagctgactcttggtagaaatgggaagaggcaatggaggatttgttcctcttttgggatttggggagagccaagttctggtggggaggaggtgaggaagatgattcacctctcttatttcctaagcaggctctgtaaggagcctagaggagggagaagcctgttctcatcaatgacttgtaatttcatgatttagaaaaattcctctattctgaaaatcatatattctctcccaatcc

SEQ ID NO: 5706 - DNA, 405 bp, Bos taurus
  Clone ID: 56-LIB34-036-Q1-E1-F8
aagaggatcactttcttaaaacgaaacaatcaagaaatcatattgtgggaaaatatttcagcaatcaaagcaaattacaacaaagacgacaagactctatgacaaatgttcaatcaccgtttcatgtcagaggtccaattaatcaggtttgctctgaaatccttctcagcaggatatgtgcccctgaaagaactgtggaagccctgcagaaggactgaacttggaattggatacaagccactcccctggacaatggtctaagaaccaaatcctggtcatcagttgtattttggttctaccacgcacactcaggcgcaagggcacacacatatacattgatgcacatttagctaaaaaaaagtcattacacttttttctacagctttataaaatcaggatgtgcac

SEQ ID NO: 5707 - DNA, 316 bp, Bos taurus
  Clone ID: 56-LIB34-038-Q1-E1-F12
aatcatatcctattacagaggcaagtcatatcatacatatcgatgaatgaccgttcgtgtgcgaactgactgcagatcgaggggatacagcaaaactatctacagcatattggaaactatgtgtaaatttcatggcatacatacctctctctcaacaatgacctgtaccacgcgcagacgcttttgtgactgaacgtaagctggagtgcagtgaggtggtatgcgaggtgtctgtctcacatgagatggtccctggacttcgactcctcttgttcagatttgctgaatgcataatcctgcaacaatttcaaaatca

SEQ ID NO: 5708 - DNA, 368 bp, Bos taurus
  Clone ID: 56-LIB34-044-Q1-E1-F8
actttccttcagtaggtttaggttggagcttttgagacctggctacaaataaagatagccccttgagaatttagtgtggacggtttgtatggatgacactgcccagtgttgctgtggacgatcaagttacagcctggagccctacttttacacaagtacaattctgtccatacccttttgtccatccctctcaactcactggctttcatcttgggcaatgaaaagttgaagaaagacagtggatggtcattgaaacctatgtgaactggacgtaggaatgtcagacaagtattcacacagggctctgcagctcaagtcataataggaacaggatgtctgatacataactgtcggtcagaaagtgacag

SEQ ID NO: 5709 - DNA, 304 bp, Bos taurus
  Clone ID: 56-LIB34-045-Q1-E1-F8
aatgagattgagctagtgccaggacttggttgtcgggacactgggttggaggtagggttctgctcctgtggctgtgttggtctttcagtatagttggactaactacatggggtcctctcccccgagtccatcctgtggacttcagtgtgcaagggaaaccctctctttctctattcatggggtggggggtcctctttctggatgacccactcctgttccagttctgactctgaaatttgctgtggggcattctcttgattttttttggtttcgcctttacctgtttgaagttgaccacaatcgt

SEQ ID NO: 5710 - DNA, 481 bp, Bos taurus
  Clone ID: 56-LIB34-047-Q1-E1-F8
gtaccggtactaaattcccgggacagaatctggccatggtataatggaagaaccagaacttacattgacaagcaccagtgatatcagtattgctgaaatggattttgcaaacttaaccctagaagaaaagagagaaaatgaggcaaagagctgttttcaggtgagtgaatttctgcctcttctgtcagaaacagaaaactcagattatccagccatgtcagaacatccactggagagaccaactgtgtgtggaggtatgtgcatcagattggtgaacccacacccattcatgaaaacttgaatttgtgacttgctgacatatttaaaaaaaaaaaaaaaaacaaaacttttttaaacagaaaccttttcaaggtgtacagctgcaccagagagcttacaagaagcattcataaaaagaaaaaaggcatttatagagagatcctcacagagacagaaagagataaaggacaaagttcatgcc

SEQ ID NO: 5711 - DNA, 322 bp, Bos taurus
  Clone ID: 56-LIB34-050-Q1-E1-F8
gatgtcacaaaacaatggttcttaaactcagatgaatgagtcccgtgtgcatcaagtccaaagccggaatggattcggacgtcgcgcaggcacaattcccactgctcatgctccaacggacgtgatgcaatgcaggctcaccgatctttgcgtatgaggtccttacagtctgatttatagccacggttcttgcacgtacaaactcacgtgtggttgcgaaagttgtcgacagatcgactgaccccgttgtgcaggcagcacagatgcaatttctgacagtcctagtgctgatcatatcatacatcgaagacggggctaaact

SEQ ID NO: 5712 - DNA, 350 bp, Bos taurus
  Clone ID: 56-LIB34-055-Q1-E1-F8
actgtcatcactggaaattgctttatttcatgttcagttgttaattttatatttagtgaatatttttaacagatggagaactgctttcaatgtttagaaatggttaacataatgtaaacagacctagctttaaaaaaaaaaaaaagacctttagatgatttccacagcaacacttagcactctttggtccaaatgagaggtaagtgctgtgtttgccaagccgggggctgtggggctcccctcgggctgctacacctgtaggtgcactccgtcagtgtcactcagagatttggggaaatagcgtttttacactaaaacaccagcatattttggaataaattcttacacag

SEQ ID NO: 5713 - DNA, 219 bp, Bos taurus
  Clone ID: 56-LIB34-058-Q1-E1-F8
acttaatggactgttttcactgttggcagctggctttgggttatttctccttttatggcctatggttcagcaagtcaactcttgaggacttactttcctgaaggaatgagtgaaactttaataaggaacattctctttggagcagtgagagggttgaactatctgcatcaaaatggctgtattcacaggatttacatggatataatgtaaagtcagatc

SEQ ID NO: 5714 - DNA, 233 bp, Bos taurus
  Clone ID: 56-LIB34-060-Q1-E1-F8
ctgtttcacaggttgtgcatagctacaataacactaacaagtctattcatagtatccacattattttgtcgatatttacaatttttactctattttggtccacaattttatagttttatcttgctatagaagctattcaataattggaattgtatcaaaacatgcaccccttcgttttatgtttgagtccagtaacacttggtttttactatccgtccagcctcagcatcact

SEQ ID NO: 5715 - DNA, 242 bp, Bos taurus
  Clone ID: 56-LIB34-070-Q1-E1-F8
cggtcgaccaagctccggtgcaccctgattggaaaagcaataattaaaatgcatatccagaaactcttcgtgatcgtagcattcagcaaacatatagtggagcagatggtggctttcattggtgctgtccccggcataggtccgtctctgcagaagccattccaggaatacctggaggcccagcggcagaagcttcaccacagaagcgaaatgggcacaccgcagggagaaaactggttgtc

SEQ ID NO: 5716 - DNA, 468 bp, Bos taurus
  Clone ID: 56-LIB34-078-Q1-E1-F12
gtcttatgtcacaacacactagagagagtcgtattagcatcaggtggccaaagtactggagcttcattttcagcatcttttgttgattgtctaaatataggaagggatacagagaccagggagaaacaaatagactagagtagccttggggcaaggtcctgtttgcccatcaatacacacaacagtatcttcgagctattcagcagatactgaaaccccttccaggtgggagaagttaacaatggtaatgcaacccacaagcatgtagagcccaggccagttagacctgtgtccagataggaagaattcagtggctaaaaagtgttcctgattttcttattcaatgaagtagaaactcaagttttaagagtagatattttttcatgagacttgaaaaaggctgattaaggtgaaaaaaagatttatacttttcccatgaatgtattcatactaaaaaaatgttgagaa

SEQ ID NO: 5717 - DNA, 392 bp, Bos taurus
  Clone ID: 56-LIB34-079-Q1-E1-F12
gtgcaatcgccatgtttccagaggaagtacctttgacacctgccacttaggtggagctgggcctttgctaaaagcacccgaaaatgatgtttttattttaaaagactaaacagtctgatccagtttaagcccaggctcacggtggagctccagcatttctcactccctgtttgcctctcaaggtagacttggaaggagggtggggtccgtgtttcctgttaagagaggagtttccgatgcacatcttcttattataagccccttccttttgtgaatttgcaacagcactgacaagcctgagttgtgaatgtgttaagaatcagcaagggggcctcgccaggtccttaggatgctgacccagattttgccatcggggttgagagctcagtttc

SEQ ID NO: 5718 - DNA, 242 bp, Bos taurus
  Clone ID: 56-LIB34-082-Q1-E1-F12
cggacacatcgggatgcaataaaaggcctcgaaccctctgacaagcttcgtcaatccagcagggagatgttagacaattctatagcaacagtgattctgactcattggttagcgacatctccatactgcagtctcacctgcagtttgtggatggtcactcatactcgtgacctgatagtcaggttcaagccctgcattacgacaccacggaatgtttcatgctagactgtcaacacctgttc

SEQ ID NO: 5719 - DNA, 393 bp, Bos taurus
  Clone ID: 56-LIB34-083-Q1-E1-F8
atacatgcagcacaggaacacgagggcacgtgggagtcccactgggtgactgtacactcagccaggtgccgtttataaatggagctaggtgccatacagagtggctttctgctcactgactcctcctgtgttcacggaggaagtccgtgatggtgtggacgggtttcctgccaagaccaccttccaccagcgagtgatgagtgcaccccggcaggccacggtgctgcagcccgcagagctccatagaagtacctcaccccagttcagggccctccctcctgagctggggcgtgccagggacctggtgcaatgcagatggttccacactgctctccatggataaattctggtgttggataaagaactgaaaaatgtgctcaatttttcatcttt

SEQ ID NO: 5720 - DNA, 394 bp, Bos taurus
  Clone ID: 56-LIB34-085-Q1-E1-F8
aggcgtgatatcatcacagtaccggagttactggatcctaacccctggatcctgactcagacgggcgcaaactccttggcgtgcaccactgacgcctctggtgaaatggagcaatccctgctgtaaaacatgatgattggtatggtcctcgactatgagtcaatttaaatagcatcgtacagtatctggtgcaccttctttcacaggagaggtcatgatctcttgaaggagatgcacttggccccggtgtccatcgtcgtcggtttcaacaaacataagtttggtcgggtcatcggcatgagccgtggttgcctcaatcatacggatcaactgatgttgcaggacatgctggacatcctgacgtgctctttgtaaaagatagctatgctcactg

SEQ ID NO: 5721 - DNA, 354 bp, Bos taurus
  Clone ID: 57-LIB34-007-Q1-E1-G2
acacaatttatcaaatcttacttcagttctttcacggatgatataatttctcagccaatgcttaaaggagagaagtctgatgaagataaagacaatgaacgggaggctttagaagtaaaagaaaattctggatatttaaaggccaaacagtatatggaagaagaaaactatgataaaatcataagtgaatgctcaaaagaaatacatgctcaaggaaaatacatggcacaagcattgctaccacgagctactttctacctgcttattggcaatgccaacgcagccaaaccagatttatataaggtcatcagcttgcaagaagctaatgtgaaacctccaacaaacgcgctcatc

SEQ ID NO: 5722 - DNA, 379 bp, Bos taurus
  Clone ID: 57-LIB34-008-Q1-E1-G10
cctgcccagaggagagcgtctgcattgtccgctcgcgacgcctgcgagtgcgtagtccgcgcggccggatcgtggcgtggacgccggacgttctcccagagggaagtctcgtcctgccggtcgtctcgggcgttttggccgacggggatggagggaacacgagaggagcgatcgatgaggctggaacgaaatagagtgcataaaaggtgtcagtgcgtttggtgtggcctgatgtacgtagtttagcagccgcacgcttctgttttcctgtcggcctgataatggcaccctctccacggaagaagacggctctccctgctgtggcgcaaggtcgttggcatcactgagcgtgaccgtgcctgagagctcatggccccct

SEQ ID NO: 5723 - DNA, 354 bp, Bos taurus
  Clone ID: 57-LIB34-014-Q1-E1-G2
gggtcgaggcacgcgtccgatggaagggcaaggttcgggatcatgagttggattcctttcaagattgggcagcccaagaaacagattgtccccaaaacagtggagagagactttgaacgagagtatggaaaactccagcagctggaggagcagaccaaaaggctgcagaaggacatgaagaagagcacggacgccgacctggccatgtctaaatctgctgtgaagatatccttggacttgctctccaaccccctctgcgagcaagaccaggactttctgaacatggtgactgccctggacacatgcatgaagcggatggatgccttcatccaggaaaaggtgaaccagatacag

SEQ ID NO: 5724 - DNA, 405 bp, Bos taurus
  Clone ID: 57-LIB34-015-Q1-E1-G10
gtaaaatgaaaaactgtgcactctgtgattttaacttctctaatatactcttgagatttttattttaatttaaattaccatctcatggccctttgagtagtaaaaccagcatttgttccctcaccagaccccatgccaaattcatcataaagaaagctcagcatccataattccaatagtgcttatcaatttagaggagggggcatttaggaaatattccaactggtcgttttatgcacaaggcttcagtcagaacatagaaaaaaaaaacattctgtgaatgaaatattgtatgttcagattttataaaagacatttttaaaagcccaatttacagccgtatattttcttatgatgtaatttatgaaaaaagatgtctgtactaacaggtgctgtaacactact

SEQ ID NO: 5725 - DNA, 392 bp, Bos taurus
  Clone ID: 57-LIB34-015-Q1-E1-G2
agtggatagcggtggaaagtcaaggaaaaagattctgattcgaggttgctactttcctgctgtcttgcatcctcattggactgcccagcccgacctgagtacctccaatggctaacgaagcttatccttgtccatgtgacattggccatagaatagagtatggagggctggggcattaagttcaagttgagcacatcaagggctaactcaacaaatcccccgtggatgctggcaaagctgtgggtgtcattcaagatatatttggctggcaattgcccaacaccagatatatggctgacatgattgcaggaaatggatacacaaccattgttccagacttctttgtcgggcaggaaccatggcacccctctggggactggtccaccttcccg

SEQ ID NO: 5726 - DNA, 412 bp, Bos taurus
  Clone ID: 57-LIB34-016-Q1-E1-G2
gggggaaaccgtgtccagacatcctgtctcctcatggggctcattgtctgactgacgagacatattttataggccgattacggaaactaattacagacagcagtgaaggctgctgagaacacaaccaacgattcagaagagaggtccatgggatgggaggggacccacaccgtgcctgcctgcgtttaaatactcccggaggatttacatcagcctgaatatcgctctgctcagccgaggcaggtggcgccgatggagctgtgcagtccctctggcaccctgaaaattcctccttccctggaggggcccatggtccagacctacaaatatgcccccggagggccctacattgccagttgttctcacacttcagtccgtgcctctcaagcgaacgtgcctctcattggaccct

SEQ ID NO: 5727 - DNA, 403 bp, Bos taurus
  Clone ID: 57-LIB34-017-Q1-E1-G2
aaaataaccacgactataaggttcgggggacgcgaagacctgaagaacgcagtctctggccctgtgttttgggaattggacagaaaatggaagctgaaagtggaaataaagaaaaggcaatggaagaaagcatagaaaagaaaaaagaagaaaaaaagaaacggtctagagttaaacaggtgcttgcagatattgtgaagcaagtggacttctggtttggagatgcaaatctccacaaggatagatttcttcgagagcagatagaaaaatctagagatggatgtaagtttcctttagtgtattatacaaattgtaagagctctatctacttctaatctatatatgctgcatataatgtacaatatacactgtgtattaaacattaaacagttaaaaatgtttt

SEQ ID NO: 5728 - DNA, 415 bp, Bos taurus
  Clone ID: 57-LIB34-018-Q1-E1-G10
atccaacaaccgctgctagaaattgaatcacgaataacagctaataatttttccattcacaggaacatttagacagctgtgtgaaatgaaaagtgaagttattctattatgaataaatgataagacttttccctaccacagcctaatagtaactgaaataggatcttgattttcagtgataaaggtctaaggctcatttaattgtgtctctttttagaacctaaaaagttcaagtttagaacttcttaagtttaaacttaagaaagtttagaagtctctctaacttttccacccagattcaatatttaggaatgtaagcagttgagagagagagagagagatagtgtgtgtgtgtgtgtgtatatacacaatatgtgagttttactttttaaaaatatgtactataacttttaat

SEQ ID NO: 5729 - DNA, 267 bp, Bos taurus
  Clone ID: 57-LIB34-020-Q1-E2-G10
gtcaacgccaactcaacattgggagatcataggaaatggagattggtctatcgcggaacagcttgtactcatcttacgttaaagggcagactctggctaaagcatctgagattaggtacagacttgaccgacggaatgtggtcaatcaggatacagagctgacggcatcacagcactgactggctgaggctttcaggcgatcataccatgaatgagcactagatcatcctgtatttaaaatgagagtttgtctagaatggtcatgcc

SEQ ID NO: 5730 - DNA, 407 bp, Bos taurus
  Clone ID: 57-LIB34-020-Q1-E2-G2
acgacgcgtggggtaaaaatgttagttaaatttctttcctatatgagttaagatattaaatgttttgaaaagaaccatctactgattttatcttgtgagttagattccaaatgaacatttgtagattttctgcacatgtgattttgtttcaccttaaatgaccattggactttattctccacaagctctacatttgcagccatgtgtcactagcaagtagcctgaataatggtcagtatacttttcatgtaaaaggccatgtactgcatatgttaaaccttgcatgactcgacgtttctgctgaaaatacactgccgttgtcatacataagcagccattaggcacgagtgactcagacaatatagaatctgcctgcagtggacgtaacccatgttcaatctctgggc

SEQ ID NO: 5731 - DNA, 398 bp, Bos taurus
  Clone ID: 57-LIB34-025-Q1-E1-G2
actccgttggctagaacactgcagactatggccgtgcccacgagccatagtttggggccatggtgtctcagcacagccaggataaggtacacagttctttcagattctcagctagaattggaagaaactctgggtggcttcattatgcccagatacacaaacccccatcccagcctctccccgcattttcctgcgcccttgcccacaccagctggtcaggcctgtccccacagccctgccgattggggaagccatgttcagtccattgcaaacacttgccccattcccatccctctgatattccagggggccaggccagcgtcaactctggaagtacccccatccatatgagacctgaaatctggggagctgagtgtgagccccaaacctgaagtgga

SEQ ID NO: 5732 - DNA, 280 bp, Bos taurus
  Clone ID: 57-LIB34-032-Q1-E1-G2
ggtcgagggacgcgtcagccattctcagtaggatagacattggcttcaggtgtggtcccggctccagggctaaggaaaatgcacaggctcctgagtgttgtgctgaagcataccagacagttgtgaggggcacatttcctgtaatgcagtagtgatcaaactcttagacagcctgaatttcatgctgatcttcatgaagatgcattttatcgttagtttcttaatttgcccacgtgctaacccggcactggtcagcatcatgatgttcagagctgcgatc

SEQ ID NO: 5733 - DNA, 73 bp, Bos taurus
  Clone ID: 57-LIB34-035-Q1-E1-G10
ctccatcgagtgttccccagacactggaaacctctcaattacactgactttggaaacatccttatatagccca

SEQ ID NO: 5734 - DNA, 389 bp, Bos taurus
  unsure (28): Clone ID: 57-LIB34-035-Q1-E1-G2
acccacgcgtccgcaggcgccttgaggntagtttgggcactgttgatgtactaaagcagcatatcaaccccaataagacactggacccttttgaaaccatgctgaagtcattattaaggtatcagtctgatagtgggaacgtgagcgaaaaccacatgaggaaaaaattgtacgaaaatggtgtgactaattgtctgcggagtaattttgctctccttataaagctttcggaagaattactggataaatggctatcgtaccctatcacttcagagaaaattgaggagctcaggtattgtcggcaagtgctttgtgaaactgttcggactgccaaactgaccccagtttctgcccggcttcaagatattgaaggaaagattgacaaattt

SEQ ID NO: 5735 - DNA, 409 bp, Bos taurus
  unsure (211): Clone ID: 57-LIB34-036-Q1-E1-G2
atcagatcataagcatccagttaaagacatacaggggttgaaaactatttgaatctttgagatgttattgtcctagagacagctaaatcagtacacctaaaccagtagtatgacaacctgatgcactgcctaaagaaaatgtgaattttttttttttaagagaatagtattttaatgaactgtatggtggtgaatgtgtgaagggcactangggctatttagaatgaaacaagccattggccctcttgtgtgcagtggataggtgtctgccaacaaatgcaccaaaaccaatttttatagaaacagtatttggtgttcagagtagctttcaaaataacatttttgtatgatggcactgcacaagctattctgacagtgatacggctttaaatcatccctgcaaagtttt

SEQ ID NO: 5736 - DNA, 152 bp, Bos taurus
  Clone ID: 57-LIB34-037-Q1-E1-G2
cgcgggtctacacacgcgtgccaatcaactctgtgtacccacaagtagcacatagtaggtgcttggaaatgttgcttgaatgctggttgaatgacggaacaacaaatgacctctgaaatgaccctaaatgattgaataataaatgacctctg

SEQ ID NO: 5737 - DNA, 423 bp, Bos taurus
  Clone ID: 57-LIB34-049-Q1-E1-G2
gtaagattaacatcatcataagaatacaaaacagagtaaatttaaaaccagcactatatgactgggttgaatctggctttttttttagaatcaagagaatggtctcatctacctacatctcttttcttgtcctataagatttctttggctttcagaaagctacagaaatgatgtgtatgtgaatcattgactcaatggattttacctgaatgtttgtatattacattccaccctgttgggaaataaccagcccagggaccactgtttacatcacctgtcttggtttcacaagtaacatattcaatgtaactgagattatgctgtaatttatataggttcataggcatatgggaggtggttatttcagtaagtgtagaccactcagtacgatgtgtaatagagacctgtaagtgggaacacacg

SEQ ID NO: 5738 - DNA, 242 bp, Bos taurus
  Clone ID: 57-LIB34-052-Q1-E1-G2
gagtctgcacggctggacgtccatgaatcttgggttctgtatggtgattaactcagattgaacgcaattggcaaccgcttctggccactgtcatgtcatggaccatgtcagggcatggagtgtgagcatactttaccgctagtcgcagcagtggcctaccaacgtgtggatccactgcccgcaatctggctcattggatgtggcttctgggggaatgaatgcctagggactgtacgccacca

SEQ ID NO: 5739 - DNA, 238 bp, Bos taurus
  Clone ID: 57-LIB34-067-Q1-E1-G2
tgttgggtctcatcctgacatagaaggtgctcacacgtttaccacgagacatctggacatagatggctggcgctatccatacaagctagccagtactgactgagagcatgatgcctttgcatagaagagactcctacagggttttcacatggagaacctgcggttactgatcagtaaaaccatctgccttggacgacatctggcaaccctaataactcccgcatttgcccttgcccaa

SEQ ID NO: 5740 - DNA, 386 bp, Bos taurus
  Clone ID: 57-LIB34-071-Q1-E1-G2
actgacacaggaagtgaaaaaataaagacttttctacaaatgagtttagatgacatcaagattgccatcctctcagctatacatgcatctacagcaatagctaaagataaaagcagcacagtgtctgggtggttagatttgttctgtgatcacctggggagtaccttgatcttcccacgaaaagacttagtaagcattgaacaccaggagataaaagatatcgagtttatcaaagaggccatgagtaaagctttggattctgcaatgaacagtgaagaacagaactgtttgtctagacttgtagaagaaatgattcctgaaatccagaaaatgctctttgaacatctctgtggctgctggaaacagtgtcccttctgttaagcaat

SEQ ID NO: 5741 - DNA, 407 bp, Bos taurus
  unsure (325): Clone ID: 57-LIB34-072-Q1-E1-G10
gcctctagggaaagtcgtaggatagtaatcaaaaactgttatatactgcattaaaaaatgttaaacagagttcatggttgcagccctcttcagagactttattgcatatcgcagttctgcatgggaaatgatccaaacacacagggatgatcctatgtcattcctaacacgtctacagaactactttctaagacaccttatgaaactagtgtctaaacacacacacacacaacataacaatcactttggaaaacatagctttaacactgattttgtttcctattttaaaatgctgaagagtgaagtcccagcctcaatgttgtangaaagctttgatgcatctgtaaattgtaatgcactctttcatgatatattttcaaaatcactggaaagttgttatacaagag

SEQ ID NO: 5742 - DNA, 102 bp, Bos taurus
  Clone ID: 57-LIB34-072-Q1-E1-G2
tcgacccaggcgtccaatcagggcacgagacgacttacacatacacatcgagcagatgaccgacgatggatccgtcatctccgttgccagtggatattgcgg

SEQ ID NO: 5743 - DNA, 424 bp, Bos taurus
  Clone ID: 57-LIB34-073-Q1-E1-G2
caaatataataaagttttattttcagagatttggatttcccaaagttaactgttcacatatggtatttttgatatttttatctggtgaattttttccagcaacattgtaacctcttgcagaaacttctagattttcttagacaacaaaatacttactttcttcagaagctatgtggagagaggttttgggcaaggattagtgcaagtgagaaagggatgagctttctgtcttttgggtgtcttatatttgaggaacattttttcaaatgcaaaatgattatcccttaattcagtaacattaggtatatttatatctctacaatctttgagaaaaatgggaggtagttttttccatttctcttgtgatttcaatgtaattcttataaaaatttcagaattactgtaccttatcttagagcagttt

SEQ ID NO: 5744 - DNA, 413 bp, Bos taurus
  unsure (393): Clone ID: 57-LIB34-074-Q1-E1-G2
acgcgtccacgcaaatgcaccagggatatatattatgggccatcagaacgttgattgttgtgaaagccacttaggaagtggagttgagccgtgaacaacacaagtttgaattgtgtagctccgcttacatgttggatttttttcagtagtaaatgctttagtaataaacaatcccaagttgttgaatctgcggatatagaaccatggttatggagggcagactgtaggatatgcatagattttggactgcatagagagtcagcaccccttaccccctcagtgttcaagggtcaactacattaagacataagcctagaaaggtggagagaggttagatcctaaagggtcctgtatttttctcattacctacctcaaaattgaagtggaatgtgntttctcttgcctgacaaaaa

SEQ ID NO: 5745 - DNA, 347 bp, Bos taurus
  Clone ID: 57-LIB34-076-Q1-E1-G2
cacgcggccggcgagcctcagctaatcaccccctcgtgctgcgccggtcgtagcgtcctgctggccagttccgcgtcgccctgcgctgctgcagccgccgcggaactatggctgtgctcgtcgtgttcctgtccttcttggtggcggatgtcattgggaacgaattcagtatattaagatcaccagggtctgttttccggaatggaaattggcctattccaggagagcgaatcccagacgtggctgcattgtccaagggcttctctgtgaaagacgatccttcttggccgggccttgcagtacgtaacctatttcagcgtcctcgggctaatgttatggtgatggtg

SEQ ID NO: 5746 - DNA, 147 bp, Bos taurus
  Clone ID: 57-LIB34-080-Q1-E1-G10
gggccgacccacgcgtccaaatttatataatgacctggtaaggcacatgtacaaccattgaaataaaatgtgatccattctgatatttttaaattccattcctttctgtcctatttcattaataaaatatgctggttaaggcctttt

SEQ ID NO: 5747 - DNA, 386 bp, Bos taurus
  unsure (261): Clone ID: 58-LIB34-004-Q1-E1-G6
cttcagaatagtttgatccacattattcaaaaatgttctctttagaactgaaattaagtattaatagttgaagcaacatgttttgagttttgtggggttaagagattattcagagtttaaagtttccatctgacatgcaagagacaagagattgtaagacacagactggtcggtgacttagagatgggatgcggaaggatgcgggtccaccaggaaacggccccagaccgactcgcggccagcctgtcagtctgttggcanaagagcaattgtgacgatacaaccactgcacggggtttacgtgactgagtccacgttgagtggtttgtcaaccatgaagcactaacacagtggccatggcgatgctgatacatttcagttggtgc

SEQ ID NO: 5748 - DNA, 408 bp, Bos taurus
  Clone ID: 58-LIB34-007-Q1-E1-G10
ttacaatattaaaagattgatgggagccattcttttcaaacttaaaggtggtttttaagttaaaatacaaactttagtgtagtttacaattttgaagatctgaatgtattatcaagtagtttacattttactcttaaccagctttcaggtttctataccccgttccttcacaaattataaaactagtacaattgtgggaaatgaatgggatccagttatgctgtacttaaaaccacttgtatttcttttgcctagtacgtggtttttaaactagctaaaaacccctagtatttgttctgtcttcacctgccttcattaaaagccctgactcaattttggtgttgagaaggaacaaaacccaggcccatcccagtgcttctgcccctcagcaccagggcccagcatgga

SEQ ID NO: 5749 - DNA, 318 bp, Bos taurus
  Clone ID: 58-LIB34-011-Q1-E1-G6
acgattttttttttttttttttttttttttttttttttttttttttttttttttttttttttatttatttttttaacccccacaaaacaagggcagaaaaaagggggggggggaaagggcgcaacaccccccgaacagcccggggaagacaaggggggggcgcccccgagaaaaaaacacaagggagagagcgcaccgggcaaaaaaacggggaaaaaaacaaagcaaaggccggggagggaaggaaggcccgaaaaaacccgagcagggccgagccaatgagaaggcaaaaaaaaggaccaaacaaaaggagtaggc

SEQ ID NO: 5750 - DNA, 398 bp, Bos taurus
  Clone ID: 58-LIB34-012-Q1-E1-G6
agcaagttccctgagaaaaagctctaattatagctaagctgttctacccactcccaccccaagtagggcagggctagaggctggacaaaagtatgcctccattttcctgtggctggtggccctccccccccccccaacccgaggccagttgtgcccatgtcctcaagtcacaacaggaaaatccgagcattgaggacacagcatgagttctagggataaaaatgacgagagtaaattctggatcaaaattaggtgaggacaaggacaaacactagcaacagggagacttgtgccctgtcctgaggttatgcaaaggacccctgactgggctccatatcttgaggtttcatgccagtgctcaagagtgagttcatgcagaccaggggatgtgtccgttc

SEQ ID NO: 5751 - DNA, 352 bp, Bos taurus
  Clone ID: 58-LIB34-014-Q1-E1-G6
ttccgggtccacccacgcatccgagaagatcacctgcatttcttgcctttcatcacctcaatgtatagcactttgtaaataaaatgcactcaataacatacctacctcagagagctgtgaggattaaacataaagtgctaagcagagtgcctggtacagagagggcactcaataaatgttacctaaagttagtattcatgacaatactgttaggacacagagctgtcatatataagatagttccaatttttttcctttgaataaaaaaaagttttataaacacaatataatattttcctactttcagcaacaatcccataatgacaagggaaatgtcacaatttaggggaaa

SEQ ID NO: 5752 - DNA, 394 bp, Bos taurus
  Clone ID: 58-LIB34-015-Q1-E1-G6
ccttcaactacactacaaagaaaaaaaacctaggtttcccacagaggtaaccacaaaatgccccacattcaagtgaaacaacaagtacaccacacgaactctcccaagagttgtgatcagcttcacaattttatggcctaagttctgtagtcttgaacacaggcaagctttcataccaagaactctcaaatgcactgcctgctaatgcagattcccactatcaaatgccacactctgaggaagcccaatctgttccgagtgctgccaattctgccttcctcaaaatccctgaaaggctagggcagttaagtgtggttttggggttctggaactagacttccaaggttctaataccagtctagcatttacttgttgttccaggccctggctggag

SEQ ID NO: 5753 - DNA, 417 bp, Bos taurus
  Clone ID: 58-LIB34-016-Q1-E1-G6
tagtttttccccaatagctatgttattcttttaaaggttgtgccttgtcccctaaggaagaaagaagatggcttgtgctgaatattcttttcatgtgccaagtctagaggagcttgttggaggtaaatactatattgagtcttttttattatcctaagggaaaaaaataaaaataaaacattccaagataggagagtccaaatctctacctctcaaaaaaacctaaattcaccattcaaatagtcttgatgaaatactaactttacagaatgaaaatgaatatgataatccaagatttaaatgtgtgtggtgcccaaagagtacacagttttgctttattaactttttaccagttgcagtactcttaaaataatctactgtgatacattaatcatgtttccaatctactactttttc

SEQ ID NO: 5754 - DNA, 144 bp, Bos taurus
  Clone ID: 58-LIB34-017-Q1-E1-G6
ctgctcacttacccatagcagggccagtgggtggtttgggagggatttttgtgtttgtctttcatttttcgtagttttgcagcactgtatggatgatgtgtgctgttacgggggatgcatgcctctgcgcgagtaagggtgggt

SEQ ID NO: 5755 - DNA, 352 bp, Bos taurus
  Clone ID: 58-LIB34-019-Q1-E1-G6
gaaaaggtgttagtggcacccaggaaagcagaagaagctgaggaattcacgaagggcaaaaacaaccctaaagaaaaagctctgggcacactccctctctcgtttgcgggcaaagccagagaaagaacagccagttgcataatccttctatttgctcagatctacattttgccttgaagctccctgccctgggaagtgattgatgaaggcacccagcaatgactgggcatggcagggagtcagtagaccaaccagaggtgcgcaaggtcttcagcctttcttccaccactgccgttcaggaagatggaggccttcaacgaatcctccccgttcaacttctccctcccgcaca

SEQ ID NO: 5756 - DNA, 287 bp, Bos taurus
  Clone ID: 58-LIB34-022-Q1-E1-G10
gcaaatgtcaggatatcatggaatttatggttatgtcagattcatggtgtccatgtggacacctatctgatgaggaaggttagcgacctcacattattccattcttcctccctcatagactacacctcgaacattgagatagtcgacttcctctgctgtatgcagacatctttcacatagccttttgaggaaatccactcataaagctcatcacacgaactttatggtcaacaccaagagtttcagacgtaatcctgacatgcccaaacttaatctcacatctacac

SEQ ID NO: 5757 - DNA, 381 bp, Bos taurus
  Clone ID: 58-LIB34-023-Q1-E1-G6
tcttcctccaactaaggttcaactcagtgggaggaagatagaggaggtaagacaagtagactggattgaaccttagttgagaaaaaattctacttaccactagttttagcaatcactgtatctttagcaatttcttttgtcttgcttctttaccaataagatatagagaatacacctaaccttaaaagattctcatttagattatcacttatgctggttactctgataattcctctaatacatctatctccctttaggatttaaatgtattagatgcagaaaactttacaggttttaacaccccatatgccatataattctataattttaatacgtcttagaatactgttttggaccacagcaataacactatttagcact

SEQ ID NO: 5758 - DNA, 392 bp, Bos taurus
  Clone ID: 58-LIB34-028-Q1-E1-G6
attgctggcttgccttccgcccgtgggagcccccttcccagaagcaggagccatgggccctgcagaaccagtcagtgccttagacttctccccgaggcccatgccccagcagagggatcagggcatgctgcagcactcaggaaatcctctgtgaatgagtgatgtttaatggaggaaagaatgccttttttgatacattcttcacattcagagttagtttttaagggaacacaggtttttaaggaaatgcaaccattgtcgtccctggggttgtgctgcttgacaagaggattggaaagtggggcttggggctaggaccccaggcccttcctgatcaggaccaggagccaaccctgaggaagtccccccagcgaccaggggcggtggttaga

SEQ ID NO: 5759 - DNA, 394 bp, Bos taurus
  Clone ID: 58-LIB34-029-Q1-E1-G6
cgcacatctcttgagtttgcctacaaatacctgtttcctgattgaattggttttgcctctgatgttacagtaaatgtcacctgctttttggttcacagtgaattttgagttactcagacactagtttagagatagaacgctaacaagggctctggaacatagccagcagaccgcactctgtgagactgtattcttcatccacttcaagtagactcccgccttcatgcggacagtttacacaccccgatgtctgtcattttaaagggtcacttgcttttcacctcagtgtaacttggtgatggatgttgcttgatagaccttagtactctgtatattttgggaaggtagaaggtaaagaggggccatattcattctttgatacgaaatgaatgaa

SEQ ID NO: 5760 - DNA, 411 bp, Bos taurus
  unsure (400): Clone ID: 58-LIB34-030-Q1-E1-G6
ggcaacttcagaaaacatgaccatgtacggcatatgatttctcatttatctgctggtgagactatatgccaggtctgctttcagatatttccaaataatgaacagttggaacagcacatggatattcatctgtatacatgtggaatatgtggagcaaaatttaacttgaggaaagatatgagatcacattataatgccaagcatttgaaaagaacataagtgattttctactgtataatgtttagctgataggagacagaacaccaaagcaaaggatatgagctatttagaaaatgattttataagatggaattgttgaaaaaaattttcaaggcccttttacctttaatatttttgtttaggatcttaagtatctacattttaggtgttattaaatgtntatcatttttg

SEQ ID NO: 5761 - DNA, 392 bp, Bos taurus
  Clone ID: 58-LIB34-032-Q1-E1-G10
atgaagagcacgatcttattacttcaatggaagcctgtgaccatgatcccagccaccagtagccaagaggacttggtacagtgcagctgcctaatacatgattcatcagaagcatttgatacaaacgtgttgcagcagcatcatcagatttagtgttgccctcttatctaggcttgtgtttgttaagatatccccactgtctctcacttccgtgccagtactgacctgaatgctgggtccacagtggattctcgtcatgcaggctggctctgtgtgactgctatttataaagccagtgtgggttagtagccatttactgagtgccagttccatggcaattgttaatgctttacgaacatttaatcctcatgcaaaccctgttgcatgaagtt

SEQ ID NO: 5762 - DNA, 259 bp, Bos taurus
  Clone ID: 58-LIB34-032-Q1-E1-G6
cggacgcgtgggattctaagcaacaacattcaaacagaacaaggtccgcgaagggctcccatcctagtccgagggtgactgcatggctcttaggattttctgtgcccgcacgctcacgtgtgaaactcggttttctttgtatgaaaatggttctccacatttctgcttctttcgcacaaacgcgccctgttctttcatgactgtgattcgttttcattctaaaatagataacatacaacttgcaggaactgacacactt

SEQ ID NO: 5763 - DNA, 425 bp, Bos taurus
  Clone ID: 58-LIB34-033-Q1-E1-G6
aacagtccttttaatataatcactctgcagaatttactctttaaaaaaataatttttaaagatgagaccaaactgtaaaaatacagttatctttacataggaatttggatagttaaagaaaaatacaagttggcaaaaataaagcctttaccaacctgattgtacagttcagaccatgtaacagtgaatgaaatgctctcactattctgtgataatctcttcaacttttgactatcctcaatttgatggactcactgctaaatgagaagagcacatcagcatgattgattcgtggagttaatgtgcttaattttccactgagtttaaacttgatattttttagtattgggccctgacaaacagctcatcttaggggcaatgacaaattcaggcgttaaaaaaatttggtttggtggtcatgaacc

SEQ ID NO: 5764 - DNA, 236 bp, Bos taurus
  Clone ID: 58-LIB34-038-Q1-E1-G10
tgccaatgctcaacgcggtacatattcgtgagagtaacattttcgacgtcaggtactgagtgccggtgctcactttcacgagcactgaccagctaaagaacatgtggaaccagagtgagaatgaacagagtgtgcacaaacacatggtgctgaagagtcgcatgacggctgcgagagagcacttcacatgcgccatggagaagatgcgtggatagtggaacctcttcataaatccc

SEQ ID NO: 5765 - DNA, 348 bp, Bos taurus
  Clone ID: 58-LIB34-041-Q1-E1-G6
aaggacgcgtggggttctgaaaaggatacctccctgctcagaacctgatttcccagatctgtgtttatagacacctctgcttggatggcttccagagatctcacacttggtgtgtcccaaagggaactctcatctgcctccagaactcttcaccctcaggcctctccatttcagtagatgacatcattgttccttctgttgctcagcccagaaattgatgcatgtccttgatgcttctcttccctttaccccacacccagtccactaacaagtcatgtgattcaacttccaaaattcatctctagtccgtcaacctgctctcagatgcatctccatgctcctggccag

SEQ ID NO: 5766 - DNA, 378 bp, Bos taurus
  Clone ID: 58-LIB34-042-Q1-E1-G10
agcggtgttcgtcccctgatcctcgcttttctctgaattcttgtgtcttatttctcattctctcgccgtattgcgctttcagaaaccctgcttgtcaagcgtgtctcgacaagtggtgccgaaatagggacccgaaagtaaatccagcctgagaagctagttcctagccgaggtgaacgtagggaaatctggccagctaggcggaagaggaaagtacttggctctggctcaattttttctgcgctgaggcataaggaacctgagctatttggaacccctggaaagccatctagtggtgtccaacctgataccatctgcctgggagcatacaaaccagtcaactttcagtttctttcaagccaagagcatcatgcaccc

SEQ ID NO: 5767 - DNA, 363 bp, Bos taurus
  Clone ID: 58-LIB34-044-Q1-E1-G6
ggtcgacccacgcgatccgggcaaaagcatgagtatgacttgagctctaccctggagaagaaagaatatgagcagcctactggtgcaaaaatcgaaaacgcacgttttaaggatactcatagcccgttgctagacgttgatccatcatctttgaagtatcctgttggtgtttctaccagcgaagtaggcactgaccataagttccatttgaaagaagatcgaggtttaattagcatgaataattttgaagattgcactttgtgtcctagtagttccattgaagatggagtccagagacaatctaagtcaaataaggtttaagagagtgaggatacattgtgaactgatgtcacttagaggggg

SEQ ID NO: 5768 - DNA, 354 bp, Bos taurus
  Clone ID: 58-LIB34-048-Q1-E1-G10
cagaaccttgggatatacaaatccatggcctacaacacacctcccattcacttcaactccacttatgccattggagagtaaccacaagattgcaaatgtataagatggcacaccttgataatgctttgggagatttcaatattgcatgacacttacagcctgcatttcactcatgctgtctagcactgaccacatgctaatcaagacaaattagagaagcaacgaacagattattgaaaattttatctcagcatactaatcgcatggcatctccttgtcactaattgaaagctcacgttaaacagtattgatgtatatttacagatcttcatattcatgtatcatgacatgaga

SEQ ID NO: 5769 - DNA, 399 bp, Bos taurus
  Clone ID: 58-LIB34-049-Q1-E1-G10
agctctgttaactagataaccttttaaatctgtgtacatgttacacattcagtagacattgtagtgaactgttctcaatagtagatggtgtttgtgggtgaacggaatgtccttgttcacactaataaacctaaaactgaagaagaggaattagttttcccagggtaaagtttaagcaggaaataacatcctagaagaaactggtcctgtcttaaagacactcgagttgttaggtctatttgaacaccagatgaagctgacagacatgtctgttccagtctttagctagcatcagatatagacactcagcctgcccactgctgttcacctgatgcccctatctccctgcaggtggcagaactggtgaggccatcgtggacgctgccctcagtgctctgc

SEQ ID NO: 5770 - DNA, 425 bp, Bos taurus
  Clone ID: 58-LIB34-049-Q1-E1-G6
aagaatctctacatgaacaaaagaaatagtaagttaggtacttttcacttaatgaacacttggattgttaagggtagtaaatggggttaaagccttgctattttatgtatcgttaccacataattgatgaacattatatcaatacaatcattgtatcgaagcctctgtttaaattacttaataagctttatttgtaatgcaaactgtttagaatccatacacagccaaatcaaagatactatataattaatgaacagtaaccaagaaaaaatatttttgttgcactactaaagatggactgcatgtaatttggtatggtgtgactagacatagcttgtaatgcatctaaattatattttcctccttttattgtcagcttctgataatgaagaaattctcctaaaggatgagatatatgaaatcag

SEQ ID NO: 5771 - DNA, 76 bp, Bos taurus
  Clone ID: 58-LIB34-056-Q1-E1-G10
ctagttctagatcgcgagcggccgccctttttttttttttttttagagtcttttcattttttattaattgtagcac

SEQ ID NO: 5772 - DNA, 216 bp, Bos taurus
  Clone ID: 58-LIB34-058-Q1-E1-G10
gaattctgctgtctatagtgctttccttcaatgtgtataatgttaaaataaataattttaaatatttgtttgtttccatgattacccaacctaaatcagacagacttgcagggctttaacttcttatttctgttgtcagaagctcgtgttggcatatatttgctctgacttgaactggcattcattaaggcatctggtcatttcagttttcaagaa

SEQ ID NO: 5773 - DNA, 166 bp, Bos taurus
  Clone ID: 58-LIB34-059-Q1-E1-G10
attcggtaactgacttgttcccctaataattggagctctgagaggtagcacttcacatagcaaatgatcccagcatcagatacggatacacgcccatccggacaactctccgcatctgccctttctgcgcctctgcaacgaacaggctcacctgtatcttttcatt

SEQ ID NO: 5774 - DNA, 276 bp, Bos taurus
  Clone ID: 58-LIB34-061-Q1-E1-G6
acatcagtcatgctcatcgttatcatcaccttcttcgtgggcatgatcggacatgacgtgtccatcgtgactgcagtccgaccaagaagctcacccaggatacatgtactcagatagtcaagtcctaatacgccacacattccccatggaagatggaaagtcattcccatgtatgccttccttagacaattatatttcttcatcaacccatgggatgggtttttcatgcatcctaaaacgttcgttgtgacacgttcacgtgtttgtggtccaaac

SEQ ID NO: 5775 - DNA, 227 bp, Bos taurus
  Clone ID: 58-LIB34-067-Q1-E1-G10
tgggtctcgtttttcatcacaactccctatactgagtcatattatacctcaaggacgtgggacacggatgagcttcagaccatcagcaataggggatactagctgcattactactgctttatgtttgcctcaaacatcctgggcttgaaataaacacaccgtactctgcagcactgtacagtaaagtgcacaaaagcacagccacgtgtacaggatgcactcgtatc

SEQ ID NO: 5776 - DNA, 234 bp, Bos taurus
  Clone ID: 58-LIB34-067-Q1-E1-G6
gcgtgcccacaacgtggtcctggccacaggcacgtccgacagcccggcccgcctgggcatccccggggaggccctgcccttcgtccaccatgacctgtcggccctggaggcggccacgcaggcaggcacggtgtccccgtcctcggaccccgtcctcatcatcggggcggggctgtcggccgcagacgcggtcctctacgcccgccactacagcgtccctggtgatccacgcct

SEQ ID NO: 5777 - DNA, 227 bp, Bos taurus
  Clone ID: 58-LIB34-070-Q1-E1-G6
cggacgcgtggggcagagcttgagagagagaaagctcagataaaacagaagttcgaagaggaaatcagaaagctgaaagatgaactagaacagcaaaagtggaatgtggaaatgaaaaggcaattggcagaaagggaggctcactgggtttcaaggcagcgaacagccagagatgatgttttgagtcagaataagatacttgaaatcatccttaaagtgttccaggt

SEQ ID NO: 5778 - DNA, 410 bp, Bos taurus
  Clone ID: 58-LIB34-071-Q1-E1-G10
acccacacgtcaaatcgcgagcggccgcccttttttttttttttttttttttttaactattaaatctgtttagtaaagacaattttgctcatacaaaacgacaagagttcacaacagtctgagagctgggcgccgtcagaggcggggaggcgctgcgggcatcagagccctgccctcgcaccccgagaaggccccgggcacccccagccctgcctgagggagatgagagctgaagcatcaccgccccctgccccagggaccgcagcgaggggccctccccacagtgctcaggttaacacgaggcctccccaccccacactggcctggatatgtcgctgagttgtttggggcggggggcggggagcggctggtgggagaggggcagagtctggacatccttggggcaaagc

SEQ ID NO: 5779 - DNA, 218 bp, Bos taurus
  Clone ID: 58-LIB34-072-Q1-E1-G6
acacatcgatgggggagcttggtatgctgtgttacacaaacaatggacctcctcgagctgtggtctcatttctgtgtgagagtggcaaacgcattcatcagaagaaagtgtgtaatggtgacaatgcatgtgtgaatagtaatgcttagctttgcagttaacacagccaaggttaaggtattcactgtcaatcgcatgtttgtatgccacagcagtac

SEQ ID NO: 5780 - DNA, 418 bp, Bos taurus
  Clone ID: 58-LIB34-073-Q1-E1-G6
agattgattcccatatgcttatagcaatttgtgctctattaagattatgccaaatggtaagtgatttatttttttaaacataaaaacataggagttttggctaagttaccatttgtaaagacaattttttaaagagaggaacagtatgttctatggcacatctacaatccttatggcagaagccctctgagctgggaagtgtggttatgagacatgacttatgaaatttttgatttttaatttaaaagtcagacctgctcagcacaaatatagctgcaaggaaataatttaaaaagacaaatgcacatcttatatgttgatagaccatatactttggattttaattttttccctattccatctcctctctatgtatatgtactcattttttttttctggtttcttaataatgctggca

SEQ ID NO: 5781 - DNA, 167 bp, Bos taurus
  Clone ID: 58-LIB34-084-Q1-E1-G6
cggtcatctgtgcgccctcgctcgtaagcgcctgactccagcgacagacagacgcttctcatgacaggttagactactgttccagcagctatgtgagatctctgcggtgggatcaaccgtcggaaattgcctgctgcctcacgcactccacgacaaccaatgactcc

SEQ ID NO: 5782 - DNA, 271 bp, Bos taurus
  Clone ID: 58-LIB34-085-Q1-E1-G6
aacacgcgtcagatttaacttaaggaaggccagagtccagagacccgcaaatgttttctcatctgtggtgtatcagcagttctgggctacagctgctgaatagataataattctaattgaagataaattacacgaacccacatgtgaatgatagatatgttataacatttcattcctggtgcataaaatcagctgcagcttttactattagccctttcttttcagaggttttagaattccaactctattcctgccggtttcaatttgacct

SEQ ID NO: 5783 - DNA, 382 bp, Bos taurus
  Clone ID: 59-LIB34-003-Q1-E1-G4
gttatccatttccttggagaagggctgcgtgacgagtactgcctttgaagaggaagagcaggaggaagaagacgacgacgaacacgacgacgacactgatgatctggacgagctggacactgaccagctgctggaggcagagctcgaggaggacgacaacaacgagaacgcgggggaggatggggacaatgacttctcgccctctgacgaggagctggcgaacctcctggaggagggggaggacgcggaggacgaagactcagatgcatacgaggaagtggaactgatcctgggggacaccgacagctctgacaactctgatttggaagatgacatcatcttatctctaaatgagtgaggagtcagcacgacgtggaaagat

SEQ ID NO: 5784 - DNA, 253 bp, Bos taurus
  unsure (106),(111): unsure at all n locations; Clone ID: 59-LIB34-004-Q1-E1-G4
atttcattagtctagaccactgcaaggttttagattgaacaagccatgaacagtacaagcaagctctgaaatatgagaagactccatctctaagcttagcaattangtgangctggaagtaaaagccacaagggggtatgaggtgagcttgccattgtggtttcttggcggtgtgtgtgaacagtggttttgaagtgaagaaattacttgctggagttaagagaaattgtggtatcagtgactaaaacactgt

SEQ ID NO: 5785 - DNA, 398 bp, Bos taurus
  Clone ID: 59-LIB34-006-Q1-E1-G12
gtgaagtcaccaatggcatacaatgttgtaaattctgtaaaactgctttgacataatgaacaaacatggtttgagctgtaaaattttacttgtttagattagaacctttatactgacagtatgaaattactaaagttctccaacaaaatactctttaaagataaacttgttggttaactgaaatacaagtattttcttatgtatttagtgaggtgattgaatgctttctgagcaatggcttgagcaaacccagtactttatttttcacataaatatttcctataagcaataatgtacataataatgtatgtaactttctatttgtaaaagaataaaattcatttaattttaataaactcttaggcataactaatttctcctaaataaatgttgaaaaa

SEQ ID NO: 5786 - DNA, 188 bp, Bos taurus
  Clone ID: 59-LIB34-008-Q1-E1-G4
tgattgtggacagtcagtgttcataagttccattccagtggattgtgagaagtttcaaattaggaagagaaattgaggtgaagtaaaatcatgtgtttaaaatccactttgaacctctctttatttatgtaagatctatcacataaaactcaaaaagatttattcagtaaaccggtttatgttacaat

SEQ ID NO: 5787 - DNA, 176 bp, Bos taurus
  Clone ID: 59-LIB34-015-Q1-E1-G4
catctcagcagccatgcacagcactgaacgatggctcctcaccacagctagccatctccagatgggtcacagtcttgtcaaagtaccaacagatatcactcccacattaacactctacggcgggaagaaccaacttgtggatgtgggtacagggggtatccatccagaggactcca

SEQ ID NO: 5788 - DNA, 387 bp, Bos taurus
  unsure (337): Clone ID: 59-LIB34-021-Q1-E1-G12
ctgcattctccatgacttcaggtcctatttagatcacctggtgtcttactcttgaatttagcccatgtatagttattaggttgaagactctttagagtgttccttctttttgttacaatacccatcttgatttaatcattcttagttgttttttttttttttttttttccattttattacccgcttgcattgtcttagcactcaacactgaatctcctctcctttcccccctttcttcacctccaaggagagagaggtgggaagcatgggaggatgggaaagagtgaaatgtgattgttagtatccaggagaggtgagttgtcaggaagggaaccangggggatgactgggaagaagccctgtgattagacacgacacgctggttgc

SEQ ID NO: 5789 - DNA, 319 bp, Bos taurus
  Clone ID: 59-LIB34-027-Q1-E1-G12
attctgggtggtcagaattggcaaccaaaagtcgaaaggaggtgggataccccgatgcagctctggctatgcgcaaaggtgttcaaaggaccttagattcacaatcggggtcatttcggcagaaatcatatgcatcgtatgtgatcctgattctgcacactccgtgacaaggtcaagcgagtttcagggagggtctgcagctagctgcggtaatagacaaccttcacagccacatcacctgaggtcaaggctagctccagaatgtccacgagaaagtcaatcatgtagaacccatagctcactgacctgtcaacacaga

SEQ ID NO: 5790 - DNA, 386 bp, Bos taurus
  Clone ID: 59-LIB34-031-Q1-E1-G12
gccgcggggcgcggggcgtgaggtgacaggttcgggggggcggtggcggcctgagcagctgagacgcggcggcgatgctggagaccctgcgcgagcggctgctgagcgtgcagcaggatttcacctccgggctgaagactttaagtgacaagtcaagagaagctaaagcaaaaaacaaacccaggactgtcccgtgtttgccgaagtactctgctggactagaattacttagcaggtatgaagatacatgggctgcactccacaggagggccaaggaatgtgcaagtgctggagagcgggtggacagcgaggtggtcatgctctccgcgcactgggagaagaagcaggcgagcctccgggacctgcagcagcagcttcagcagctt

SEQ ID NO: 5791 - DNA, 217 bp, Bos taurus
  Clone ID: 59-LIB34-032-Q1-E1-G4
ctttattattattttttttttaaacaaaagaaatgtctaaaagcaaatacacgtatgtaccaacgggtgtccgccaacgtggcgcagccatggcggcggaggagaccattgctcagcggactggtctgggtggacctggacatgacaggattggacattgagaaggaccagattattgagatggcctgtctgataactgactctgatctcaacattt

SEQ ID NO: 5792 - DNA, 282 bp, Bos taurus
  Clone ID: 59-LIB34-041-Q1-E1-G4
atattccgcagcaactaaagcaaataaaatggaaagcctgcagttactttattactattattcaagtcttaattattggaagtatttaaaaactgattacaattaactggaaatgaattgcatactttatagaacacatgacagttttgctaaggacctgtggtcttgagatctctatggctgtcgaacttcttgggatttggtgaatcaaagtatttattggtccagttatcacatacagactcttgataagctgtcaaatttcacagttaactgaaatgt

SEQ ID NO: 5793 - DNA, 298 bp, Bos taurus
  Clone ID: 59-LIB34-044-Q1-E1-G4
tagtggaagacgaggcagctcggagagatcgagcagcgagctggatcgcggagcgtgagtgatggagcctatccgcccgcccgccgccgccgccgccgccgccgccgcctctcctccgtaaacatgagcccgggccggggcccggcacgccgcccgccccccagcagagcccctcactcgtcgtcaggccgcgagggcagcgtgcgcgagcacatggggagggacagcgaacgagccaaagagctctgggacgatgcggccggaccgaacgagcgcccgggcgtgtggcatgagggga

SEQ ID NO: 5794 - DNA, 69 bp, Bos taurus
  Clone ID: 59-LIB34-045-Q1-E1-G12
ggaaaaccacagtccggtggatcggcacacgttaacctcgagtaacaccgacttcgccttcagcctcta

SEQ ID NO: 5795 - DNA, 400 bp, Bos taurus
  Clone ID: 59-LIB34-046-Q1-E1-G4
agcctccgaaggactaatggccgctcaccccgagacggctgtgggagaagaggagccgatggggaccagcaccttcgccccaggggacgtgcccagcagctcttggggcaaagcactgttgccataagctatttccggggtgcctttagggcccttccctcagcacgcctctggggaaagatcacactgtattaacttgagagggttttcctcactgacaataaacagagaccacctcagctgccagtgccttgcagccctgggccaccctccccttgccaggcctaccttcttcgctgcctccgctgtgcctcttggctggcatctccgctgacccaggagggcgtggaggggctgtccactgccgggggccctggcccctctctccctgcccctgggc

SEQ ID NO: 5796 - DNA, 260 bp, Bos taurus
  Clone ID: 59-LIB34-047-Q1-E1-G12
gcagtgtcctgaagcccgtggtggtcatctctgcatctaagcaaatgttcatttctatcatggcaatgccatcactctcttaactcctcatcataccttaccttttatccggtttccctgccataagttctgtcccatccctacctatattcaagctgttactgttataataaattaatgtaacagagtaaaaaaaaaaaaaaaaaaaataagaaaaaaaaaaaaaagaaaaaaacaaaaaaaaaaataacacaatagac

SEQ ID NO: 5797 - DNA, 241 bp, Bos taurus
  Clone ID: 59-LIB34-052-Q1-E1-G4
gaatggtggagggtggggaggaaagggcaaggtggacaggagagaaagaaacagaacgactctctgttcagcttgctagagatgagatgagagggaaactattatactttgaatagtaactatagcagatattatttattaagcaagtattctgtgtcagttctatgcttaaagtatcttaaactcacctcacttaatgctcacaaacctaccgtgatagggaacagtatctatgcccatt

SEQ ID NO: 5798 - DNA, 221 bp, Bos taurus
  Clone ID: 59-LIB34-057-Q1-E1-G12
atcctatattatatatgtaatgttcagcctaatgcatatgaaacatttattctatccttatttgacttatgatggcagtgttaaattgtaaatgtgttttcttgttaatgttaccaaatgacaattgggtaatacagctactggttttagaggaattcaggtattctttccagacactgttttcagaataaagagtatttttcataatattttaagataca

SEQ ID NO: 5799 - DNA, 239 bp, Bos taurus
  Clone ID: 59-LIB34-060-Q1-E1-G4
ccctgggatatgaaaaacgccagacaggaggatgcaggacttcttggaagggtctgccatggctatgggatctgacaaggcctcttgccccaggatgtgcccactgaggtgatgcccaccatcataaaggaatacctaggcagcagctcagatggacaagccaagcgagaggccctccaggaattgttaagtgacattatcataaccttacccatgttgcaatttgcgagagacctcca

SEQ ID NO: 5800 - DNA, 251 bp, Bos taurus
  Clone ID: 59-LIB34-064-Q1-E1-G12
gcgtccgcgagaggacaccgcctgcatctagagcagcccaaccaggaacgtaaccgagtggcgcgcgaacgtgagaggaaatctgtgcgcggctgcgctttcccgcccctgaaccgttctaaacccggagctgtgaccgatttctgtgagtgacagaaaaactgtcctgcctctttccccaatcccccacccctgcttgagaattacgtcggtcaagctattccacacctgttccttcaagggaaaaatgc

SEQ ID NO: 5801 - DNA, 57 bp, Bos taurus
  Clone ID: 59-LIB34-064-Q1-E1-G4
caaccggcggcccccattctaaaactaccgcaaacggccgccctttttttttttttt

SEQ ID NO: 5802 - DNA, 232 bp, Bos taurus
  Clone ID: 59-LIB34-068-Q1-E1-G4
ccgggtcgacgcaagcgtcaggaagaggaaggccagggaattctcctgggatgctgtccaccatagtgcccagtgcagactgctgcaggcttgatctccaagttgtcttcatttacctccacctgggtcacactggaagtcctcagagttggagcagcagcttcagtgcagtgtgccagctatgaatcaagggtcttgggggcaccaggtaggagcttaagcttgccaggag

SEQ ID NO: 5803 - DNA, 221 bp, Bos taurus
  Clone ID: 59-LIB34-069-Q1-E1-G4
agtcaaaaggtgggcatcttgtgccccgaaggcagattctaccctcttgccagcctcgagagagaagtgagtcaggtcaccgagccagaattaggatggagccagaaaggccatgaaccagatcgcacagtggactgagaggcaggagggcagtgtgggtagcgagaggaccgggaactggctgatacagatcaatgcaaaagacacatgcttatgttgcg

SEQ ID NO: 5804 - DNA, 75 bp, Bos taurus
  Clone ID: 59-LIB34-070-Q1-E1-G4
tccgggtcgaccaacgtccacgtagccccaggctcctctgtccatggaattcctcaggctcgaagacggtgagag

SEQ ID NO: 5805 - DNA, 81 bp, Bos taurus
  Clone ID: 59-LIB34-072-Q1-E1-G12
gcgtccactgggatgctatgggatcaggccccagagctttccccacatgctgcctaataatgaaatgctcatttatataac

SEQ ID NO: 5806 - DNA, 380 bp, Bos taurus
  Clone ID: 59-LIB34-072-Q1-E1-G4
atgaggctttattcatgccatagttaatgaagaaaaactccaaactagttgaggagcaaaactacccatactctacattgtttcatttgatgttaagtcaagtaaagtaagttttatgccagtaagagcctaagacattttcaatgtctgcatgtttgatactgttttcaaatagtatcacactagtgccaagatttactaaatgtcttaaaattggcccatttggaggggtacaaatggcaaaaagaataatcccaatgcacaagccaaaatgttatgaagaaaattggaattggctaaaatggaaaattaatcctaaatggtttaaattcctaagaagattcaatctttaacaatgatgacttcctaataaaaacttt

SEQ ID NO: 5807 - DNA, 95 bp, Bos taurus
  Clone ID: 59-LIB34-073-Q1-E1-G4
gacccacgcgtcaaggaatgaaatgcatcttctttctcatatggaagagcttgctcttcttaacacaacataaagtggacttgcatgagactttc

SEQ ID NO: 5808 - DNA, 64 bp, Bos taurus
  unsure (7),(13),(34),(44),(49): unsure at all n locations; Clone ID: 59-LIB34-077-Q1-E1-G4
tgggtgncttttntttctcttctccttctcttcngctctgcttnttccnggggtgtgtttcgtc

SEQ ID NO: 5809 - DNA, 305 bp, Bos taurus
  Clone ID: 59-LIB34-081-Q1-E1-G12
ccaacgcttcagcccggaatcatcccacgtactgcatttcccctcccttatcacggtacgtccccgggcagggtccatgccctgactgcaggcagggttattacatctgcgcacgcccgccgcccttctaactgtctcaatgcccgcaggtatgagatctcaggcattatccaacatgttcacgctctccctaatcgcattccaacggcatcacaatgactaagtagaagcaccgcttgaacagttccgcagctccctctaggactggctgctgcaatgacccttagaaaatgccttgtagcaag

SEQ ID NO: 5810 - DNA, 176 bp, Bos taurus
  Clone ID: 59-LIB34-083-Q1-E1-G4
cgcacgcgtccaatagttatagatcgcgagcggccgctcgcgatctagaacgtctgacatagccccagaccccacaaggatttctggacctggagagcctagagggaggcccagcccccagcctcagggctggcctgatgggagagctgaacaataaacgtcgttgtcttcgtctc

SEQ ID NO: 5811 - DNA, 385 bp, Bos taurus
  Clone ID: 59-LIB34-086-Q1-E1-G12
aggatgaatcctcgtatcaggaatgattaagtatttggtacagtaagttccctatgtaaaaacaagttccgttctgagagccaagttcgtcagtcaaatttgtttataagtccaacaaagttagttcatctacccaaccagcacaattggctaaatagtactgttctgtaatagatttataagtcttttcacgcaaataatatgtaaacacaaaaaataaacatctttactcgtacagtacagtaccttgaaaagtacagtagtatagtatagcagatggcacatgggctgtcatcgagtgaacaggcgaggagagttactaactcaaggaggtgggagatggaggagcttcagaccatcagcaataagggataccagctgcatc

SEQ ID NO: 5812 - DNA, 164 bp, Bos taurus
  Clone ID: 60-LIB34-004-Q1-E1-G8
gttctgtctagcgtttcggcttgggcaatatacaacgcaggcgtcctctgacagcaagcatatgcactcctgcactttagacacgggtcaccatggcgattagtcatacgtccagattctgtctgctgcccatgctactgggccgcctgagtagaagcgtgggc

SEQ ID NO: 5813 - DNA, 388 bp, Bos taurus
  Clone ID: 60-LIB34-009-Q1-E1-G8
aggacgcgtgggcagatacagcacatgtctggaagatcttttctgcagcagcacttactaaagaacaaattttaaagctctttgtgtcctacgattatgctgtgaagcagtcatggcttgcataccctcattatacacctccagagaaatgcccctccatcatactccacgatcaactttattacctcaacggcatagagtttgcagcaagtgccatggaaatgagtgccattgcaggctacaatgctgctctcctcgcctatcaccgctggaatgggaacacacacatgattgaccaagaggacttatatgagagacttaaaacagaactatgaaacaccactctctcctttatccctctcctggttccaaatggaatatcactggc

SEQ ID NO: 5814 - DNA, 344 bp, Bos taurus
  Clone ID: 60-LIB34-016-Q1-E1-G12
gtccaagatggagggcgctccgcgggcgcccctcgctctccggctgctcttcttcgcggccctgccagccaccgggtggctgacgaccggcacccttgagccgccgctcctgccgccagccccgaaggacagcatcagaattaatgtaactaccctggaggatggggaggtgtctaaagaacaggttgttcttaacataacctatgagagtggacaggtatatgtaaatgacttccctgtaaatagtggtgtaacccgaataagctgtcagactttgatagtgaagaatgaaaatctggaaaacttggaggaaaaagagtattttgggattgtcagtgtaagga

SEQ ID NO: 5815 - DNA, 338 bp, Bos taurus
  Clone ID: 60-LIB34-019-Q1-E1-G8
gaacgtgtacttccaatcgaacgtcttcgtcctcacatcctgtcacgcccctgcgacaaaaactaacactcctcgacttcgaaaactttgtaagccatacggcacgaggacgccaccggaaccacaagtggcaaattgaaccccattgcctgatgagtcatgccagctacacatgaagggacatatgtgcatggcaactggtgcctccattggtaatggtaggggcatatctttgcagctctgccaaacaggtgacacagtttacatcactcggcgccacctgtccacactgcatgccactgcgaatgaggagcaatcccaaggaagccagagtgtgc

SEQ ID NO: 5816 - DNA, 281 bp, Bos taurus
  Clone ID: 60-LIB34-024-Q1-E1-G12
attcttcgtcgtgaccacaggcaactgcatggacactagggcttgagcgcgttcacaccatggacgccgatgagggtggcaggcaatgaagatcctgtgcgcgcgggctggaacagtacggcaaggtcatctgcacgcatcttgacttccgtgaccttgcagatggctttgaccatcatgtcttccatgcgagaggcgaagccggcgttgacaatggctaagacgtcggaggtcactaccaccttgtggaaaagcggcatgctgtggagccacaggacggc

SEQ ID NO: 5817 - DNA, 198 bp, Bos taurus
  Clone ID: 60-LIB34-032-Q1-E1-G8
ctcttcttgttcttttcattttatcttattttatggttttttttctctgcttttaaatcaaaattcgcttttgaatccagttttttgcaagccagatatgggcataagcggtttggaaagaaagccctggcgtaccacaaggctgactctccacatcagggaaaaacatatggaaacatcgagggaattgagggggaa

SEQ ID NO: 5818 - DNA, 143 bp, Bos taurus
  Clone ID: 60-LIB34-033-Q1-E1-G8
aatctgcatttatcaaatctttttttttttcgtcattgtgtagctcagtgaatggtcaactcgctgctgtgtgcgctgtgaaccttctgcctccgcatttagctgtattgtgacacccctcttaaccatctcctgtctccatc

SEQ ID NO: 5819 - DNA, 387 bp, Bos taurus
  Clone ID: 60-LIB34-036-Q1-E1-G8
gtctgctggggggacatctaacttcaacccttcttcagtgaaaaagctctattcccatccttaccacagggagaagagagttatactctgtcatctcctcaactgcaaagtcatgcactgggtctcccaattttttcccacccacccctaggacacctccccatccctttcccgtgttccccctcccctgcttctaagaccacacccaagtgccccctggatgtgatcacaaaagtcaccaaagtccctgccaggcccctacgccccctcccaccaccacctgagctgtggggatgcagacagaacaggcctctctggagaccctgggcatgaggaagcaagactcagcataaaagacagaggttttgtcctcaaatattttttaat

SEQ ID NO: 5820 - DNA, 415 bp, Bos taurus
  Clone ID: 60-LIB34-037-Q1-E1-G12
aggaaaaggagcaacagcttgagtggaagataggagagagtagggacaaggtggtcaaaggaagaaaatgtgtttttaagtaggggtgaggtggggctagtagcagtcagaagagctgctgacaggtccaatatttaagaactgaaaagcttcagttttggtagtcttcaggcaacactggtgacttcgagatgtatttcagagggttgatgatcttgaaaccagagttctctaaggtggggagtgaatggaaatggagagccaagtcagtaagtatggacatctctttcaagaagcttgacaattaaaaaaagtatcactcgagctgctgggtggagaatggattgtagcagaactagatttttaggaggaggaccagtcaagagtttgttttaaaaggctaaatgggaaatga

SEQ ID NO: 5821 - DNA, 433 bp, Bos taurus
  Clone ID: 60-LIB34-039-Q1-E1-G8
acttggggtttcctgtacttctctcaagagccttttgaatgactggaatgtcacagagaaagaagtgttcagaaagaggtagttagtatttctgggaagcttacctgaaatccaggatgctgcttctgcaggttgttcttcactggggatctttattaaatgtcatcttggaggatagcccagcaggtagaactgcttatttcttggggcaggatgggtcaagaatcctaaaaggggccagatggtgctgtcagagcaattcctttctcagttgctgtagtttgaaaaatacttgttgtagttgctgtagtttgataaatactttattgaaaattaatacttaaaacattttatcagaatatctgatttcttatcccaaggcttttttttgtttttgtttttaaacagtaaaaactttgttgtcagacatttc

SEQ ID NO: 5822 - DNA, 424 bp, Bos taurus
  Clone ID: 60-LIB34-040-Q1-E1-G8
tactcataagatttattcttaacattaaaacttaataaagcacgaatgccactgtttggtttagtgaatattaagatcacacaaatccgatatatggagatgataaaagaaacttgatttctgaacatgctcaagatactgctttttgatttggccagagaaatattatagtaaaaactattaagtgaattttgtttacaaatagggaaattatacatctgtatatttaaggtggtgtgatagaatatctttaaaaagagtttggtccagttttcacagattcattttgtcttgtatgaacattttgaagtaaaagttgttcatgagtagtacttgatgaaaagatttttgtttctttgttttaatggattagaaaaatgtgtttacaatcttgatcttacatgatcaccagtgaaatagtaac

SEQ ID NO: 5823 - DNA, 81 bp, Bos taurus
  Clone ID: 60-LIB34-045-Q1-E1-G8
agagtgctcagccttcccgggcgacaattcccgaaaacagtcgtagtacgtcaatgatgttgactagttctaaaaagatca

SEQ ID NO: 5824 - DNA, 194 bp, Bos taurus
  Clone ID: 60-LIB34-046-Q1-E1-G12
ttcgcggcgtcgacgcacgcgtcagaaatcgagatcagattaaatcatgtggttcgatgaataagttttgatatcaatcttcgggttctctaaaacactgtgctaaccttcaagatatatgcttctgcaacgaattagtgactgaggtcggatgagaatatcactaggaaggacataaatactttaaaacggca

SEQ ID NO: 5825 - DNA, 225 bp, Bos taurus
  Clone ID: 60-LIB34-058-Q1-E1-G12
attttagttatcctgtttggcatgttagtcatacgaagtaacaggaagattccacagatgtttaccaccaatattaccaagcacctacagaagagaaaatgcatcatttttgtcacaaatggctatttatatgtttaaaatctgtggtgcacatttccacccagagttttactaggagcagtgtgatgatgatgataattattgcatttgcgatatgtcagaata

SEQ ID NO: 5826 - DNA, 197 bp, Bos taurus
  Clone ID: 60-LIB34-059-Q1-E1-G12
attggatcacattgtacttcaagtgatatgtctttctaattagatgtttccttttgccatggaatcaaaagcacgacatgggaaagctgccatatgagatcacacctctcccagttgtatgggataattcgcaaagtaagatttggaatgtcggcatgtctcaattaaaggaaccaaatcattcaggtccagtgttc

SEQ ID NO: 5827 - DNA, 206 bp, Bos taurus
  Clone ID: 60-LIB34-059-Q1-E1-G8
ggcaataagaaatacacaaatattttatccttatctaggaacttaattcaagcattggttattcacagaactcattgattttctttcttaaatcttccttctcttttttcttccttcttccttctctcctcccttctcctttggtctgtccttcctctgccttccatccgtcacttctctcaccctggcttcactttcttatctat

SEQ ID NO: 5828 - DNA, 251 bp, Bos taurus
  Clone ID: 60-LIB34-060-Q1-E1-G8
ggtcaacccacacgtccgcagctgggtgctcctcttgagtcagccctagccacggcagagatgttttccgttagggacctcagcctggtccggagtttggtgggtgcaattaacacagaagatgggacagatccctcagtggggacctttgaaccaactgagagaggggtgcctggcgatatgcatgtccagggaactgctaagagacttcacattagcacaaaaaatggccactgcctccacacacattc

SEQ ID NO: 5829 - DNA, 206 bp, Bos taurus
  Clone ID: 60-LIB34-068-Q1-E1-G8
acagaaaggatcctcttggggtgggatctgcagctgtttgctattttgagacgtaagatgctgccccttccagcttctcacacgctgcctcttgcagctacgtgtggaattctcaggctgtggggatctctcaacccttcatcagaaggcagcagtgtcgaagttttaaatatgtgtcaaaagctgaaaaatgagatcctgctgat

SEQ ID NO: 5830 - DNA, 198 bp, Bos taurus
  Clone ID: 60-LIB34-070-Q1-E1-G8
gtcacacaaaataaaatcaataaaaaaataagatcccaaaatttccaaatattaaaatactgaatataaactgttcagaagtcttgcttagtgtctcatatacaccatgtctaaatcttcattctacaacagtatctagctcattttggtactagtctatcttaagccccaacaatgctccatttccatgcaaacttc

SEQ ID NO: 5831 - DNA, 54 bp, Bos taurus
  Clone ID: 60-LIB34-075-Q1-E1-G8
ttgagtcgtatgattttctggatgtgctaggtcttcactgctgcacccaggctt

SEQ ID NO: 5832 - DNA, 282 bp, Bos taurus
  Clone ID: 60-LIB34-085-Q1-E1-G12
agattggatactggagtatatataaagtaaaatcttttgacactattacattattttttcctatgtaaaaactgaggacaatttatatgaatcacttttctcatgtagaacaggttattcaagttgtagtacccatataactgacaatcctagccacctggcctaatctgggggatctgacagaaagtttttgttagagactggaaattatactggtctctttaaagaaaaaatttgcaattcaatactgacaaatttttgcttgtagttttactgtacatt

SEQ ID NO: 5833 - DNA, 418 bp, Bos taurus
  Clone ID: 61-LIB34-003-Q1-E1-H2
gcggcagcacatggcggctccaggacgtcctgctcgggagacagcggcagccccaggcccacggcgccctacgtgccgtgacgctgcctcgaggaccaagaagcaaaagaagaaaacccgggatggggcgtctgttgccaatggaagcgggaagaccccagaaaagcatgaccccgaggaagcccccctaagcgcagaggcccaagctgagcagctggctcgggaactggcctggtgcgtggaaaagctggagctgggactgaagatgcagagacccacccctaagcagatagaacaagctcttggagccatccgaaccttgcgcagccagagaacccctctgccccggaagaggcaactgatgcgctctttgtttggggactacacggctcagatagaagccgagtggcgcgaggcc

SEQ ID NO: 5834 - DNA, 407 bp, Bos taurus
  Clone ID: 61-LIB34-008-Q1-E1-H10
cggacgcgtgggccggctcctcctctaccccggtctccaccgtggtccccagcccggagtgcgccgaggttgcagcgttttccactcaagccgggggctgcggcgccggcgtgtgcgccccaggagggccagggggcctcacccgccgtcccggatcgaggtcccgtaccctcctccctgccccgagagggcgagggcttgaggaacacgcaccgttcccccgccaacccgaccgttcgtcccggaatgcgggagggaatctgtgactcgcgacgtggagaccactggggaggggaaggtctctcactggggtcttaactcggggcgggggcgcccattccacggcaaaaaacaaaaaaaactctccccaccggctgcctcgcctggcaaccgggtctccccccaac

SEQ ID NO: 5835 - DNA, 276 bp, Bos taurus
  Clone ID: 61-LIB34-010-Q1-E2-H10
ccgggtcgatcacgcgtccggactagttctagataggcgagcggccgcccttttttttttttttttacttttttttttttgttttttttttttttttttctttcttttttttgagcgattaacacttaagattttactctggaaaacatccaaactgtccaaaagtcagacatcagcaacatttacttcccagcaagcaacttcaacaatattcaattcacagtctttcttgtttcagctttgccctcacgccttctaggcctgcgtggattattt

SEQ ID NO: 5836 - DNA, 262 bp, Bos taurus
  Clone ID: 61-LIB34-013-Q1-E1-H2
ttcccattatggatctgttcactagcggggaagagcaacatgtccaaacaatgttcgaagttctttggctctggggccgccagctcatttggcatctgtcatggatgatgttttgatggaaatgtgtaatactgtgtgcgctgcaattttatgtcggtcactgaattgtgtgtgtgtgtgtgcatatgttatatggcccagttaactgtgtagagatatatcttaattaaaagttttcataggcattttcagcatttgctgt

SEQ ID NO: 5837 - DNA, 420 bp, Bos taurus
  Clone ID: 61-LIB34-014-Q1-E1-H2
agatatatgtaggtccttttttaatagtagtaataaatcttccagaggggaaagtttgtgctcctaaggacagtaatcttcctcgtgcctcactttcatccctaagtgggtatgactcttgttattaccacatgctttgttggtatatttcacaaatttactttaaaaaaattattttagatattgcataacatgtgcaatccagaataattttataatagccaggtcataaaaaacataactttattaagaattcacaatatttgttctcccagtaatgagggaatgaatgaatcttttggagatattgatattaagcaattattttttgcaatattgaatgtgttactttagttttttttttttttaagtagggcactacctgctatctcatcttgtattactttttgatgtaaagca

SEQ ID NO: 5838 - DNA, 391 bp, Bos taurus
  Clone ID: 61-LIB34-026-Q1-E1-H2
gatgaatgcttacagattcagggatattgggtctttacccttcggaatttgagctgcgtacttatttgatgtcatttgctccacatcagtgctgtgttcatgcggaatttgttctattacccgttacaaatctcacgtacaactagttgcatgattgacacgttattgtgcctcttttgcaaatctgagtatgcttctggaacttctgtgcataagcagtactttcgtttctaattccaaacactggtttatgtaaatagcaagtacatccagttgtataatttttaaatgccttcagttgaaagcatgcaaaactctggtttttaagcaatagcttctgatttccttcagttctttttactcttcttggatgtagctgagttttgatcac

SEQ ID NO: 5839 - DNA, 379 bp, Bos taurus
  Clone ID: 61-LIB34-027-Q1-E1-H2
cgcttttctctgaattcttgtgtcttatttctcattctctcgccgtattgcgctttcagaaaccctgcttgtcaagcgtgtctcgacaagtggtgccgaaatagggacccgaaagtaaatccagcctgagaagctagttcctagccgaggtgaacgtagggaaatctggccagctaggcggaagaggaaagtacttggctctggctcaattttttctgcgctgaggcataaggaacctgagctatttggaacccctggaaagccatctagtggtgtccaacctgataccatctgcctgggagcatacaaaccagtcaactttcagtttctttcaggccaagagcatcatgcacccttgggtagccatcctgggcctcct

SEQ ID NO: 5840 - DNA, 340 bp, Bos taurus
  Clone ID: 61-LIB34-044-Q1-E1-H2
gggtcgcccacgcgtccgtgagactgtcacgtgatgacagtgtgtccggtatggctgccttccacagaaaataaagtgatgcagtctacagtgaagcactgtcttagattccatagaaatgagacatttgtgcgaaactggggacagaagatgccatgccaatgcactcgttgcgggagaatgccgatcagtcttggaaacattcgcttcgcctcctctgagattttctgtcagaagtgataccctgtctgtgcacttccagggaggacttcacaacacctatgtcaatcaggaattgattgggctatttgacgagacccttcaggaggtgaaagtctac

SEQ ID NO: 5841 - DNA, 384 bp, Bos taurus
  Clone ID: 61-LIB34-045-Q1-E1-H2
tgagatttgtaatgacaccttatagtgctgacgtgcattaagggcactacccaattatgcttttttttttttttaaaggataattgcttttcagaattttgtggttttctgtcatacatcaacaagaactagccataggtacaaccatgtctcctccctcccggatacccctcccaattatgttttaatgaaagaaagagaaactttggtattaaaaaaaaaaaatcactttctgtttgctgccaagaagcattgggaaaatggtgacggaaaaactttgcatgtgaatctttgtgtttttcatttgggacaagtttcatttaggacaaacccaaaaggggaaattggccggttaaacctggaaagctctctaaacaatctgct

SEQ ID NO: 5842 - DNA, 221 bp, Bos taurus
  Clone ID: 61-LIB34-057-Q1-E1-H10
agtaaataaaaggccttcaggaaccccgtctgctggctggccgtgccagctgctctgcgtcccgtgcgtctcacggtggcctgtgagctcccgggacgcttggctttcactcgggcagtggaggggattgctgagggaggtttatgaggcccttggtgacaaatgtgatttgagttcctttataatcagtaactgcctgcctgccaagaacaaccacacct

SEQ ID NO: 5843 - DNA, 125 bp, Bos taurus
  Clone ID: 61-LIB34-058-Q1-E1-H2
cccgggccgacgcacgcgtcaacttcgggtcgtgtgatcatcacacctgaaacagtaggcgaaagagtgtcttgaagtacatttcagtgtccagcaacaagtctcactcacacgagactcgttgc

SEQ ID NO: 5844 - DNA, 244 bp, Bos taurus
  Clone ID: 61-LIB34-060-Q1-E1-H2
gcgcaggcttgcgggacccaccagtcagccttgggacctttgtcgctgatcacctgtttagggaccgtgccccacaccccagctcttcagcccctgccacagccgtaacaccaaccgtgtcctggtcccaggcccagctggtcctagcatgacagtcggatgtatcatagatcttcagcatctgggcatctaggagattgaccatcaggacaggaaaatgccgttgcctcctcacacattcagt

SEQ ID NO: 5845 - DNA, 221 bp, Bos taurus
  Clone ID: 61-LIB34-065-Q1-E1-H2
atccggaagactagttactgatgattttatagaaaaagatattctgataaaagcaaactggattttcccttccttaatctccagagatttctaatgccaaaaaaaaaaaaaaagaagaaattttatccaaaattagttgcatgcctgtttatctcccctttgctttacctttataatttttttagaaattttatttttttaatttagttttggctgtgctg

SEQ ID NO: 5846 - DNA, 202 bp, Bos taurus
  Clone ID: 61-LIB34-066-Q1-E1-H10
cttatcgatacagaagaaataatttctgcataacttgattcttctatctagtacttgtattataggtaaccaacactgataactttgtagtgatgactaccaaagaaatgcatagtaaaacaaccttttatttccaaattactaaagagccagccattgacgctgctacgtgagttccatgctcaagagccattgtaagaga

SEQ ID NO: 5847 - DNA, 200 bp, Bos taurus
  Clone ID: 61-LIB34-068-Q1-E1-H10
cggacgcgtgggcgggcgaggagcggacgccgctggccaggatggtgctggagagcgtggcccgcatcgtaaaggtgcagctccccgcgtatctgaagcggcttccagtgcccgagagtattacagggttcgcccgactcacagtttcagaatggcttcggttgttgcctttccttggcgtactcgcactacttggctac

SEQ ID NO: 5848 - DNA, 398 bp, Bos taurus
  Clone ID: 61-LIB34-075-Q1-E1-H10
ttcataccagatcctcctgagagtccttttagcactgatttgtcatagcaggtagctgacaaggtttaccccaaggactagaaacatgggctgcgtcatccaaaaggcagaagtgctggatggagctcacttgatgcgaatcatctggcatgatggtacagactctatctacccggctgtgtggctccgggacaactgtcagtgtcacgactgctaccttgattcggcaaaagcacggaaacttcttatcgaagctcttgatgtgtacgttgggatcaaagacttgatgtttgacaggaaaaaggttcatatcatgtggccaaatgaccattgcagtgaatatggagctgattggctgaagaaaagatgcttttcacagcaagccagagaaaaactcc

SEQ ID NO: 5849 - DNA, 429 bp, Bos taurus
  Clone ID: 61-LIB34-084-Q1-E1-H10
cacgcggccgaaattagctggcatcttaaaaacagcataagaaataatgacattttaaaaattaagaaattttgcattaaatgaatggtaataatgattcttatgtgaaattttagaaaaataataattgtgaacaatcattagtaaatatgcagcaatagtgcagtgtctttacaaggagcaggtaaagcattagtcttgaatgaaaatacttgtctgagaataaaaaatgtcacaaattgagtgaaaacatcagatgatacctattttgcattgatctcttttgtgagaatagcatgataattttaaatatcactgggttcatgttatttttattatttcaaatgttttaaatattgcattttaaaaagtaatctttttacagtttttactggagctgaacatgattttatgttaacagattaattt

SEQ ID NO: 5850 - DNA, 255 bp, Bos taurus
  Clone ID: 61-LIB34-084-Q1-E1-H2
agcgagaggtcgcccatatatttagtgaacctaaatccggaggacactttccggaagatgcacaccttgcaccaggttgaagtcgctcaattcaagctgcaaacagtgcactgtgtttgcctagcagtccacagttagttatagataaacgggatcgcggcatgaacatgtgcatttaaccgtgaatatacacgtttctggagatgcttacaggactgccctccagtgccagtgacgaagatccaatgcagacac

SEQ ID NO: 5851 - DNA, 381 bp, Bos taurus
  Clone ID: 62-LIB34-002-Q1-E1-H6
actcacacaagaagctgctaaaaataaaaataaaatgagatggaaccaagaacccagggatagatcagaaaagctcatttaagtattataaaataaaggaaaaatcaagccatttgaaaaatggaatgcttttgaacagtatgattcatccatattactaacaacatctcttctgaccaaattcattggattaagtgtaaaatgctaatcttttaatgggtctagatttagaaatctttacctactgctcatacttgtgttgcagaattatgggatggtgtgaggtttgctttacaaattcttctctgactcctaaattctctaatgccatgtcttaccagggaataagaaatttcttacatgaatatcatcccctaaaac

SEQ ID NO: 5852 - DNA, 414 bp, Bos taurus
  Clone ID: 62-LIB34-008-Q1-E1-H6
cccgagggcttcgtcaacagcgccgtcatcaacgactaccagcctggcggctgcatcgtgtcccacgtggaccccatccacatcttcgagcgccccatcgtgtccgtgtccttcttcagcgactccgcgctctgcttcggctgcaagttccagttcaagcctatccgggtgtcggagcccgtgctttccctgccggtgcgcagggggagcgtgactgtgctcagtggatacgctgctgatgaaatcacccactgcatccggcctcaggacatcaaggagcgcagagcggtcatcatcctcaggaagacgagattagatgcaccccgattggaaaccaagtccctgagcagctccgtgctgccacccagctatgcctcagatcgtctgtcgggaaacaacagggaccccgctctg

SEQ ID NO: 5853 - DNA, 365 bp, Bos taurus
  Clone ID: 62-LIB34-013-Q1-E1-H6
atccaaataaatagtagcctatgagatacttagcaattttccctttagggactgttctctagcaaggaagagcagcatgtccagacagtgttcgaagttctttggctctgaggccgccagctcacttggagtctgtcagggatgatgttttgagggaaatgtgtactactgtgtgcgctgcaattttagtctgtcgctgaattgtgtgtgtgtgtgtgcttttgttaaatggcccagttagctgtgttgagatagagctaaactaaaagttttcttaagcattttctgcatttgctgtaatttctccccccaagacactaagctgtactgaacagttcatatctcaggtgcttacaggatcaatc

SEQ ID NO: 5854 - DNA, 273 bp, Bos taurus
  Clone ID: 62-LIB34-014-Q1-E1-H10
tcagggtcgactcacacgtccaggccgaagcagagctgatgatctaaatacaagagtggtctactggtcaatacgataagccctcattcacctgttggttaatatacggcaggtatttcgtttgagatccttcatctctgatagaagctgcacaaaacctagtgttggatcgtaatttgcgaattgaagcactattacctctgttatattgctgttatcgacttacattaaggtatggtggaagttcatttaccataactttggatagcttat

SEQ ID NO: 5855 - DNA, 404 bp, Bos taurus
  unsure (387): Clone ID: 62-LIB34-018-Q1-E1-H6
aacgagtgcgtagtccgcgcggccggatcgtggcgtggacgccggacgttctcccagagggaagtctcgtcctgccggtcgtctcgggcgttttggccgagggggatggagggaacacgagaggagcgatcgaggaggctggaacgaaatagagtgcataaaaggtgtcagtgcgtttggtgtggcctgatgtacgtagtttagcagccgcacgcttctgttttcctgtcggcctgataagggcaccctctccacggaagaagacggctctccctgctgtggcgcaaggtcgttggcatcactgagcgtgaccgtgcctgagagctcagggccccctgcacaccctcttctcggcaggattcagagagaaaatacccatcttcctgngacatggcaggtaagaa

SEQ ID NO: 5856 - DNA, 402 bp, Bos taurus
  Clone ID: 62-LIB34-021-Q1-E1-H6
cttgtacaatttctctgccctcccaacaaagatagtatggggtagcacataaagtattccttttaacctaattagtaatttatattattctgtattgagcacacccttactcattatttggcttgtaaacattcacctaaattatggctacaataatttttaaatagtctggaaaaaagcttcacattttaatcacttttggctcttaaacagcccacaaatgccattaatagtttattttgttttagagttatttaatgttattttatgcaaaataatgttttgttttgttttgctttccacatggaaaaaacattagaactgtgtatagtaaaagattttatgatgtatctatccaaacactatcccatgttcaacaagtcatattttacttaaactact

SEQ ID NO: 5857 - DNA, 258 bp, Bos taurus
  Clone ID: 62-LIB34-025-Q1-E1-H6
ctttgggttgtcaatgaacctagttaagggcatgatcttcaccctctttgaaaccgtgggtcacctgtgacaccatctggagaatgaaatatactcaggcggggcttcgtggatgattctttcaaagacaaatcctcaagtgacttgtttctttggatttttatcctttgccctctacgcgtcccttttcacgcatcaacgctcccccactcccacacctggggaagatgcaatgcctgtggctgaagcagcagtttt

SEQ ID NO: 5858 - DNA, 393 bp, Bos taurus
  Clone ID: 62-LIB34-028-Q1-E1-H10
aaagcaaaacaatagttgagctacatctggcatcgtcaacttggactgtaccgaatccctctcccccgactcccttggtctcacggagaccctcccgcaggttccttcacctgcctctacccctcccacaccctgtggctcctgactcaaaagcatgtttgaggatgagcctgcgtgagttctttgtctctttaaattaatgcacgatgactctgtgctttgccagttcaagacgaggatgcgattagaggctgtttaccgtggcatcatgtaatgctatcctgtgccatctgtggtagttgtttacttaccctccccttggatggggaggtcataggttgtctgtataagtcactatgtcatctctgaagatgaagctcacactcttgggca

SEQ ID NO: 5859 - DNA, 382 bp, Bos taurus
  Clone ID: 62-LIB34-029-Q1-E1-H6
gtgctgtttggtacaataggtgtaaaattctgtaaaagaggagtgcagacgcttaaccctgtaggtttgttgatgcatgtggtgagacctgcagcttattggggtgatgcaacactctgcagttttacggagtttggcagggacaacattttcagttggattttcattggaaatgtgaagggtgtcctgatcctttctcatgatcatatgcagaaaaataatgatatttgtgagtagggcccacatttacgcttaatctaatattacatttgtgtaactgctgcttctgaaaggcaaaaaagaaagtaatgccagcatttttaagagaattgaatagacctgttgcaagaaggttctgacgaatcaatcctggtttacctaa

SEQ ID NO: 5860 - DNA, 370 bp, Bos taurus
  Clone ID: 62-LIB34-032-Q1-E1-H6
gacagttggaacataggtgaattcctcaagtgatgatttgttaattcgatacagagcattataatgtactctgggtagccttcatacactatcaaaggttatacagaggttgattattgattattgttgacatcttacattacctactcctttttaatcagttcatgagagactttactctcttttagtgtataatttaacgtgtacattagtataactcttttaccaattatgttatcaatttatgctgtcgagggaacgatctgttgcagatcaccagaagtatgggaatatcttatcatgacctaaaattctaccagtctgagatgatcatttctgaagctcatcgctttagatagcctgatgcctg

SEQ ID NO: 5861 - DNA, 427 bp, Bos taurus
  Clone ID: 62-LIB34-035-Q1-E1-H6
cttagatctgcatgtgaaattcaagcttattttaaggagatgtttgtatgagctggctggtattttaagcctgtttctaagagcctatgttattaactgaaaccatcttggtatctggactcgcagaactctatttcaagatgaagtctttgggaaggcaagtacgaattctccatgggtcatgcgcttcactccctttactgctccctgctgcgaatgaatgttttattttaacctactatagaataatttcttggcaactaaaattagaaaaaaatagctgtagtcaggcctgaccacagcatctgctgccatgtggctttgtctactccatgaagccattaactgagctacagatcttccagttcaacctcttaattctattatacaaagccaagaaacgggaaagtggagaaagggccacagt

SEQ ID NO: 5862 - DNA, 402 bp, Bos taurus
  Clone ID: 62-LIB34-036-Q1-E1-H10
gtcacgggctagacacgcggccaaaagcgatccttggagtgtagaggtattgccaagtgactcagaggccccagatctaaagcaggaagagcgactgcacgaactggagagctgttctggactgggtatcacatctgatgatacggatgtcatggaggtcagttcccgccccagcacaccaggcctcagtgttgtgtccggcataagtgcaacctctgaggatattcccaataacattgaagatctgagatctgagtgcatctctgattttgggggtaaagattctgtcactactccagacatggatgaactcacccatggtgcccaccagctgacctctcctccgtctcagtcagagtctccgcttgccatgtttgatccaatgtcttcgcaacaacgggg

SEQ ID NO: 5863 - DNA, 423 bp, Bos taurus
  unsure (335): Clone ID: 62-LIB34-038-Q1-E1-H6
cttcgctgataacggcgtcgcgatgtgtgtggactgtgtggagaaggaatatcccaaccggggtaacatctgcctggaaagtggatctttcttgctgaactttacaggctgtgcagtgtgcaataagcgagattttatgctgatcacaaacaaatctttgaaagaggaagacggagaagaaatagttacctatgatcatctttgtaagaattgtcatcatgtaatagccaggcatgagtatacgttcagtatcatggatgaatttcaggaatataccatgctgtgtctgttatgtggtaaagccgaagatactatcagtattctcccggacgacncccgacaaatgactctgttattctaagcatccttctgcagttctgtaataacacggttgtgttggtttacaatacagcaagcctgatg

SEQ ID NO: 5864 - DNA, 373 bp, Bos taurus
  Clone ID: 62-LIB34-046-Q1-E1-H10
agaagccttttaagtacggcagtggtttaattgcaataattgattaacagtgatttgaaagttgagtttttattgtctctgatcaacgtgaaggctgactgtagagagcttgatttccagaggaagacagctctgtaattttcacaattactgcatctattaatttatatagtggaggtttaacagtaaactagagtggacataaaattatgtaaggcaagcaagaacactttaaaatcctcattcacattattgtggttgtacgtgataccacggatgtcgagacgtctgcaaaaaattgtagggatgttcagactttgatgtgcgttagaattactttgagtcatacaaaacccaagcgtattgtaacagt

SEQ ID NO: 5865 - DNA, 227 bp, Bos taurus
  Clone ID: 62-LIB34-051-Q1-E1-H6
gccgccttcagcgatctggtcaaagaatcgcccatatttgaaagatgttcctcggatctgggactgttttcctcacggggtgggccagggcacgccctccacggtcagggtgcgggcagccgtgtctggggccccatcctggcagtaccagcgagtgctgaatcagggtcgcccgccatgctgaacccagagcccctgggccgtgcccgcctggccctcggtggtgc

SEQ ID NO: 5866 - DNA, 349 bp, Bos taurus
  Clone ID: 62-LIB34-055-Q1-E1-H6
aaagaaaagaagcttctgaagcaggctgcaaaggccaaacctgccccaacaaccgatgcagtggcccccaaaactgggggcgttccaacccaggaccctgcaccccaggaggaaaccggtggggtgagcgcccttcctaaagcacaagatgattctgaagatgaaatcccattgctggtgccattgaaggaaacttcagctgcaggaagcaccaagatacaaaaagctgcaataggaaagaagtctccgaaaaagagtcctggtcccaacacagctcgtgcgaagaagagaaaggcctccccagccctggagaccccaatagctgcggagcccaagaccccagggaaag

SEQ ID NO: 5867 - DNA, 255 bp, Bos taurus
  Clone ID: 62-LIB34-056-Q1-E1-H6
ggataaactatagccacggtattattccctgaaattgtataaagtagagattcattccttttcctgctttccatggcctaaggccatggatcattctaatgtaacagatatctcattatttgcagtagaagctgcatgttagacttgcatatgatttgaaatgaagagcatggccgtaactaaaacgtgttgaagattcatctttgttaagagctctagttgaatcttttaaaaatactaaataattttgagctc

SEQ ID NO: 5868 - DNA, 172 bp, Bos taurus
  Clone ID: 62-LIB34-058-Q1-E1-H10
gtaatatagttacattctcttctttcagtatgactaccaatccaagggaaataaatatacgaagtgggtaacacacttgcaaaaagatcagcacaaatccaaaatataaactagattgacagcaaccaaaaagaagagaatgtaaatacaacacaaaagaaaatcaaaccac

SEQ ID NO: 5869 - DNA, 187 bp, Bos taurus
  Clone ID: 62-LIB34-062-Q1-E1-H6
attaatcttacagccatattatttgcatattgtgaatatatttgtagttttggttaactgcatagtcaactcaatattatcatcataatcattgtttcatctgcaatatcaagatgtatatattcagaaatggttattttgtttttatgccaatgctttcaaatgttttaatagggagttgcataaa

SEQ ID NO: 5870 - DNA, 182 bp, Bos taurus
  unsure (89): Clone ID: 62-LIB34-063-Q1-E1-H10
gtggtagacatctaaatttttgtaagaaaaattaaaaattataacaagcaacaaaggaacttcccgtgtctgtctccacaagccactcncctgtcgtctgctgggtgggccagggtggccctgtggggtccgctgcatccaggcccccgggatgtgccccccacacggcccctctctacgca

SEQ ID NO: 5871 - DNA, 179 bp, Bos taurus
  Clone ID: 62-LIB34-065-Q1-E1-H10
ccttccttgctttttttctttcccctttaccttttcccccgtcagtcttttttctttctactctactttctcaactgctttttcttttttctttctttgaaaaaaattcaggggcaacaaaaagagtcccacaaatcgaacctgtagaaatataatgctgaaatgaatagctagaaaaa

SEQ ID NO: 5872 - DNA, 212 bp, Bos taurus
  Clone ID: 62-LIB34-065-Q1-E1-H6
caaaatctcccgccgctctggaattcataggttctaggtttgcgccgctcactttggcgctgtgaaattcctgttatttcttggtttgtggatcatttttgcttttaattctcttttctcgaaatatttcggcgtcaagtcactgcaaggcactagtcattttagtttggtctcaaacgtcacctcccagacaccttcgggaagttgtgcct

SEQ ID NO: 5873 - DNA, 208 bp, Bos taurus
  Clone ID: 62-LIB34-068-Q1-E1-H6
attttccaccaaatgtgacaaaattcaattcatttgcaattcatggatcaaaagatgaaagaagctatgaagctctttaccctgtacctcaacatgagctgcagcaaggacaaaaacctgatttccatcgtctggattacttcaagcctttcagttttaacacactgcttggagaaaagtggaaccaaccagaatcagacctgtggct

SEQ ID NO: 5874 - DNA, 392 bp, Bos taurus
  unsure (232): Clone ID: 62-LIB34-072-Q1-E1-H6
aggctacaccacttggcatgtgagatcttagttccccttcccatctctccaccggggatccaactcatgctgtctgcattggaagggcagagtcttaaccactggactgccaggaaagtcctacttttcaaaatgataaagattttttttaattatgataatgctgatgatggtatgataaaatagtctcatacactgctgacagaagtataaagtgattgaagtttcctgngaagcaatttgtgtatatgaagaatctccagaatacttaacaattacactcctcaactgaggaattatagtcctagaaatgtatgctggacagtcatcaataatgtggcatttctttgaaggtgttgaaccccgggtaccacagggtataagagaggagg

SEQ ID NO: 5875 - DNA, 388 bp, Bos taurus
  Clone ID: 62-LIB34-074-Q1-E1-H6
gggccgacccacgcgtcagcggacgcgtgggcttgaagcaattctgccacttgataaaattttcaagggcccagacaggcttcttcagaaggaccaattctgttcccagaacttacctagaattcatgcttcactgggaaaagctaaattccaaaagcatttccctctcaatctcactcacaaatctgcaaaagtagtagtggttggtagtccaaggtctggctgaaagaagacttgtaaatagtgtcaagttaagtttcctcgctaaacagtggaatgtacagatagaaaacctttttgagttgccaggtcagccggctcataacttgagttaaaaagggatcattctctccctccctgctgccccacacttcaatactctacagtc

SEQ ID NO: 5876 - DNA, 382 bp, Bos taurus
  Clone ID: 62-LIB34-085-Q1-E1-H10
aggtcgcgggcccccctggcccggccacctgggactgtgctggggagtcggccacctccctctctcccctcgtccgcaaagtttgtggcgaagccggtgccggggtagagcgcgccccgggggagattggtgagcgcccgatgctgggcagcaggagccgttgacccgggacgccgccgtccggggcaggagcgcggagcagcagatcagcccgccgcctccggtgcatggggcccggctgaagagccagcatgggcaactgcgtggggagacagcgccgggagaggccgaccgccccaggacacccccgcaagcgagcaggacgcaacgagcctctgaagaaggagcggctgaagtggaagagcgactacccaatgactga

SEQ ID NO: 5877 - DNA, 140 bp, Bos taurus
  Clone ID: 63-LIB34-001-Q1-E1-H12
acgcgtccactatcaataaacctaggcatagttgtgttgttggcgtcagtgtgggacgtcacgggcctactgggttggaagctgcaggtcgtacagtcttccctatagaacatcggggggctcttccagtctgattaata

SEQ ID NO: 5878 - DNA, 244 bp, Bos taurus
  Clone ID: 63-LIB34-004-Q1-E1-H4
ggactcatcatggatgcatactgatgtgaagtggctaaaatgaactaagttcgaattcagatctgtagcaacactgcgcattgggacaatatatttactttcaacatttcagaacacctgttgatacacaattacatccatgtgactcacatgtgaaagactttgcctgcaaggatcgacagtaagttccacatcactgggtatggtctatctcatcgacacagggcaatgacactccagtcaa

SEQ ID NO: 5879 - DNA, 376 bp, Bos taurus
  Clone ID: 63-LIB34-012-Q1-E1-H4
agcgtccgatagatctacacctgatgtgtagctgttgaaaagattagacagtaagaatttacatttaaaagtctacattttttttaaaccaatttttatttaaaaagttgggaagttaaatcatgtgactttaacgtaccttctcagttataagtttatgaaagtctgagaccttgagggtgttttggtcatgtgaagaggagagtgccatgcagtgtagttgcccagtttacttggggtaaggcatttagttctacatttcagttatctagttctaccctgaatgccttgataacactcctaatgccctggtatgcctaggcattgccgtttttggctcacatttctgacccgtggattcacatagcagacattt

SEQ ID NO: 5880 - DNA, 395 bp, Bos taurus
  Clone ID: 63-LIB34-013-Q1-E1-H4
ggtcaagcgtccgatttaaaacaatatttgttaaagttttcttgcactatcacaattgctttttagttatttctcaagaagcatgtttgtagtagagacaaaaatctgtgtaacaggagggaagatagcgccaagtctctgggcgtttttttcctttgtttttgtttattctttttgcaaatgtgcttctaatagccattgccttccatgttgtttacctaatcagcacattttgtctgaatacttgaacatttaacaataacacaggtatagaaacagaaagtaaacttatagagagtaatcttgtgattcagttctaacatcatgacaatgagcgctttttctagcaatgattttaaaattttgtaagtttgacagtattttgttgttgggtt

SEQ ID NO: 5881 - DNA, 299 bp, Bos taurus
  Clone ID: 63-LIB34-015-Q1-E1-H4
catccacgacggcgctcggactcctgctccgacccacatccttgcctgccggacccgcgccggactgactccaggacccccagccacgtggactcggacgccgctccgctccgcacgcgatgcggaccccaggccccagatctgcccggccctggaccctcccggaggatgcgtacgaagccgcccaccctcagggccgtgcggcccggcccgggggataatagccccggccccaactgcccgccaagtcccccaaacgcccggtccaacacggacccaagcgggcgcaacccggtcca

SEQ ID NO: 5882 - DNA, 264 bp, Bos taurus
  Clone ID: 63-LIB34-020-Q1-E2-H4
ccgacccgtccgaggacgcatggggtgccacattgctactaggcattcctagttcaccacagacagcaagcctggtgaaaacttcgagttcatccggccactagataatggcccgtactagggcttctcatccattcgcctggcactggatctcagctaatgactgtctttcctgacagaccttatacacttcaacgtggagctaatctacaaattccaaaacgtcctcaaccgcatcgaaatatataatgctggagtcacaca

SEQ ID NO: 5883 - DNA, 398 bp, Bos taurus
  Clone ID: 63-LIB34-021-Q1-E1-H4
tcgatccacgcgtccgtggttattgaaaatgttgcaactgaattagcaaaaagcaagcatgctcttgtttgggctcaacgaaaagaaaatgagtcttcttctttaattaaagacctaacctgtatggtgaaggaacaaaaaacaaaacttgcagaagtttctaaattgaaacaggaaacagcagcaaatttacagaatcaaatcaacacacttgaaattttaattgaagatgacaagcagaagagtattcaaatagaacttctcaagcaggaaaaaatgcagcttatttccgagctagctgccaaggaatcgctaatttatggtttaaggacagaaagaaaagtatggggacatgagttggcactacaggggtcttctctagtccaaaatcatgggag

SEQ ID NO: 5884 - DNA, 446 bp, Bos taurus
  Clone ID: 63-LIB34-024-Q1-E1-H4
ctcacgggtccacacacgcctctaaatacatgtagaataataaccttttcctatatggaccatctatttaataacaaaagttcttagtgaagtatttagtcttggtttttctgcttgtacaatttctctgccctcccaacaaagatagtatggggtagcacataaagtattccttttaacctaattagtaatttatattattctgtattgagcacacccttactcattatttggcttgtaaacattcacctaaattatggctacaataatttttaaatagtctggaaaaaagcttcacattttaatcacttttggctcttaaacagcccacaaaatgccattaatagtttactttgttttagagttatttaatgtgaatttaggcaaaaataatgtttttgttttgttttgctttccacatggaaaaaaacattaaaactgtgtat

SEQ ID NO: 5885 - DNA, 401 bp, Bos taurus
  Clone ID: 63-LIB34-029-Q1-E1-H4
cgagtcacgcgtccggttggcttgtcagtctatcttcctcccgtggagcagggcgcgatgagctgggagctgctgctctggttgctggcgctgtgcgcgctgctggcgctcgtggtgcagctactgcgcttcctacgtgccgacgcggacctcaccctgctgtgggccgagtggcaggggcgacgaccagaatgggagctgactgatatggtggtgtgggtgactggagcatcaagtgggattggagaggaactggcttaccagctgtccaaactaggagtttctcttgtgctgtcagccagaagaatgcatgagtttggaagggtgaaaagaaagtgccttgagaatggtaattttgaagaaaaagatatactcattttgccccttggactgactgacag

SEQ ID NO: 5886 - DNA, 376 bp, Bos taurus
  Clone ID: 63-LIB34-031-Q1-E1-H12
tcccgggtcgcgtcagacatcctcaccagagatcataggttctacaaagtgtaactcttacccattgccacataataaaccactccaagactcactggtttaaaagaggatattttataatttttcatggttcagtgatttgactgtctctgttctgcatggcctctcctcctcgaataagctatactgtgttttttcccataacagagaatagattacaatcgagcaattccctaatgtacaagagtttatcaagctcgtacttgcatcgtaattgctcatcttcagttgaacagagcaggtagccaaattgagattgagtgtgagaggtgagcatacaagggtacagatagcaagtgggttgattcactggaag

SEQ ID NO: 5887 - DNA, 261 bp, Bos taurus
  Clone ID: 63-LIB34-038-Q1-E1-H4
atgagattgattgttagattgattgttatatatttatcttgtatacagccaagttctcttattaattctgggtggggttgtttttatttgtttttgtttttaactagatcctcttagggttttatagatattcaatatcatctgcaaataaagggaatcatgtctctttttccactggcatactttaatttgactttttattaaagcagtttcaaatttgtaaaaagttacaaaaataaaaatagtacaaggatcatccat

SEQ ID NO: 5888 - DNA, 324 bp, Bos taurus
  Clone ID: 63-LIB34-039-Q1-E1-H4
tcgacgcacgactccgaaaatactctacaacagggcacatcaccctttctccttcaaagcccatatgcaatacatcaaagatgtcaagataatttgagtctattttaaataatagtttccatatttaaaaggtagaagaggtacacacgagtctaagctatgattaattgatattaattatgttaataacactattaacatattctttaaaacatttgtatcttgagggctgtgaataaattgaataatagccgggcaaggtttggatgaccacatcaatttcaaatttgccacttttgaatctcatcagacactacgtagctc

SEQ ID NO: 5889 - DNA, 245 bp, Bos taurus
  Clone ID: 63-LIB34-054-Q1-E1-H4
caagtttacaattccaaaattctttcagtccagagaaactgaaacaggagaatagagataaagagattactcatttcagttctacaaacatgcatgtgtttcctctgggataggaaaagaataacaaggggacattagtgcagaggaggaaaactagcaatgaatgagccccacagggctccgtacagaattgttttaaattttgcatcacctgggaggtgggtgctcatcctcattcaatggga

SEQ ID NO: 5890 - DNA, 210 bp, Bos taurus
  Clone ID: 63-LIB34-062-Q1-E1-H12
aaccgcggctcttcgccttgaccgttgcgctccacctgtcttcagccggctgccaggcaacaacgcttggccgagcggctctaccgcccctgcctccactccggcgcaggcgggtgctggatcccgggctgatccaggccgggttttgcggcggagtccgagatcgctgatttcctccttcatcggttgcccgtggcagcggtcggcggc

SEQ ID NO: 5891 - DNA, 222 bp, Bos taurus
  Clone ID: 63-LIB34-065-Q1-E1-H4
atccgcttctatgcgccggtacccacggtcacggcctacagcgagacgatcgtggccgcccccaactgcacttggcgcaactaccgcagccagctgaccctggagccgcgccctcgcgccctgcgcttccgcagcaccaccatcatcttccccaagtgtgccagcaactccttccgcaccaccctgcacctcagcctgggccggccccgctgctggttcacg

SEQ ID NO: 5892 - DNA, 85 bp, Bos taurus
  Clone ID: 63-LIB34-066-Q1-E1-H4
cgcgtcggagctggtgtgcatcgtgtacaggtgcttcaccctgcaggtcgtctgtgactcagcatcttccgtcatcctcctcata

SEQ ID NO: 5893 - DNA, 229 bp, Bos taurus
  Clone ID: 63-LIB34-067-Q1-E1-H4
gaacccttgttcagtatgttgaggaatggatatggtctgaatgtacgtttgccttcactttcaactacatcaacagtgagcctatatgaagaagtgggttcatggcaggattcctttctgctgtctttaaccacaaagatgtagctctagcttttaacttgagccctgaataatgagctcaggaattttgatactaggattaacaagggaaggatttgagctgtactgc

SEQ ID NO: 5894 - DNA, 127 bp, Bos taurus
  Clone ID: 63-LIB34-068-Q1-E1-H4
aggttaatgtcttgctgcggctttgatttccctgaggatggtgagcatgtgcttagtgcttagcagtcccttgtgtatgttttctgaaaaaatgtctattaaagtcctttatccactttttcactgg

SEQ ID NO: 5895 - DNA, 130 bp, Bos taurus
  Clone ID: 63-LIB34-075-Q1-E1-H4
caacactctaaagtgagtcggactaaccgtagcagcgacctggtgcatttgagcacgtttatggaagaacatgccacaacactgagcacacccaaggaagagctttgaaggccgtgggggtcggcacagg

SEQ ID NO: 5896 - DNA, 385 bp, Bos taurus
  unsure (265): Clone ID: 63-LIB34-078-Q1-E1-H4
tcggcctccggagtgaattctgcaggcccaggccccccgccccacttggagatgtgaccttggaaagctgggatcctcttccctattctgggcagctctgcccttcccacttccccacctgattccttgcggtgctccagccctgcccaggaccaccttaaagcccatcttagcacatcctcctgaacccagatgggctgcttgtgtccccatgcggttgtgcccagggcaggaaagcatctctcttttcctgtccttatcccangaggggcaagatacactgaactttggatagattcaagaaaaattgtgaactttcccccttcaagaccttaatccacaaaatgggaaagaccaagccaaattaataaattccttcctcctt

SEQ ID NO: 5897 - DNA, 273 bp, Bos taurus
  Clone ID: 63-LIB34-084-Q1-E1-H4
aaaggcatatttgctggttggagctcacttgatgccagtcatctggcaggatggtacagactctatctacccggttgtgtggctccgggacaactgtcagtgtcccgactgctaccttgattcggtacaagcacggcaacttcttatcgaggctcatgctgtgtacgttgggatcaaagacttgatgtttgacaggaacatggttcatatcatgtggccggatgcatattgcagtgaatatggagctgattggctcacgagtagatgcttttc

SEQ ID NO: 5898 - DNA, 369 bp, Bos taurus
  Clone ID: 64-LIB34-007-Q1-E1-H8
gacccacgcatccggccatttgaggtaaagtgtaggcctcatcagataacaatatgattggcagatccttcaaagagtggctggatggtgaagttgggcttgttatagcacagcctcaagtcttgacttggcctcaagtcatagccctcaggtgctttggagaagagtcttgttgggtatttgtctggatggtcatttcttgcagttattaagcacaaaaatattaagcaaaagtaggaataatgtgaagtaaagacgattttttaaataaataaatgattatttaaaaaagtaaaactgctaacataaaaaagtccagtaaactaatagttaatgaaacttttagtcagtaaatattttttattttgc

SEQ ID NO: 5899 - DNA, 425 bp, Bos taurus
  unsure (392): Clone ID: 64-LIB34-012-Q1-E1-H8
tcaagccacgcgtccaattaaatcatggacgtgatgcactgtaatgtttgtgaggtagacagtgaaggaaaaggtgtggaaggagaggtgagaactcagcaaagcttcccaggcttgttcacctggaagctgaggacagacacagcttccctgtcccctcttcttgtctccatccagctggacacttctccagtccccagggggaggccagttcttgggggagtaaacatggttctttcctttcttccatgtgtttgactttgaactgactctggaagacatgaaagcaattgatggcctcaacagaaatagaagatgctatgaatttctaccatcagtgacttgcagatgtttcacacatatgttattttctgtagcaggcagttcagtangggaactaagttttttaaagcttaattctggga

SEQ ID NO: 5900 - DNA, 381 bp, Bos taurus
  Clone ID: 64-LIB34-019-Q1-E1-H8
catagaagtctttatctggactctatttttagccacatggaaatcaaattaagctgatcttttttctcaagtttttgagagtgaggatgcctcagatcaacatttttaaaatattctttattcttacgttcttttaagggtttaaaacaacgttgagtaattagtctgggcataccaggtaacaagctgataagtttgtgctgaacaagaagtagcctttggattgaaattgctgttttgagaaaggatagaaaatataattaataattatgagacttgacttttctatttgcagataatatcctgataattctgatgaaaatagacttgggtaatttttgataaaagaatcgttccaaaatgggcaattgctgttctcgt

SEQ ID NO: 5901 - DNA, 143 bp, Bos taurus
  Clone ID: 64-LIB34-028-Q1-E1-H12
attgccacatgctttaagtacttgggttcaaactcacaaccaccacctgtcagtcagatactattattccctctttatacatgaggacattgggatccctactgcgaatgggttgcgcaaagagtctaacccctggggggcgg

SEQ ID NO: 5902 - DNA, 52 bp, Bos taurus
  Clone ID: 64-LIB34-029-Q1-E1-H8
ggtcgaccgacgcatccgactagttctagatcgcgagcggccgccctttgtt

SEQ ID NO: 5903 - DNA, 376 bp, Bos taurus
  Clone ID: 64-LIB34-033-Q1-E1-H8
gggcaacctgcaggagaatccatatgctacattgaccatgtctttggcagagactaatttctgcagaaaatatggatttgatccccagagtcccctctgtgctcacataagactatcaggaactgttatcaaggtgagtgaaacagaaatggatgttgcaaagaattcgttattcattcgacaccctgagatgaaaacctggccatccaaccataattggttcttcgctaagttgaatataaccaatatctgggtcctggactactttggtggaccgaaaatagtgacacctgcagaatattataacgccacatctcagtgaagcagcatatggcgaatttaacctcacgtgtgaaatttctgaggaagtttcacg

SEQ ID NO: 5904 - DNA, 412 bp, Bos taurus
  Clone ID: 64-LIB34-037-Q1-E1-H12
aatttgtagttagtttttgctatttattaagaacaaaatgtcaaaaaaattatgactattcttggctgacttaccactgttaaaaatgacaaaaaaagctaaatttctaaattcaatgcaaatctttgttagctcactctaggagatttattaagcgaaacaatgaagaaataagtgggagatagttactttgtgcacgtttttctttaaatgatttttaaccgtgggaaggcatattattctttttgctgtatttattgatgcaaggaacactgcaacatctttatttttagatgtagttgtagtctactttgatgtacgtagatttaaaatagaacattaagaggtattagatatttcttaatgttttcatagagttcaataagtgtaatggcaatgttacctccaaagc

SEQ ID NO: 5905 - DNA, 227 bp, Bos taurus
  Clone ID: 64-LIB34-042-Q1-E1-H8
actatttatggagaaagggggctcattttacagagccttatctccattgtcagttgaaagagttttacaaagataccatttcaaccttcctattcatgcttaactgcaattgccccatatgcttggacaactgtacctaggattcagtagaaacatatacaggagaaatactttctttttttttcaaataaaactatggaatatctgaaaaagatcaaaaaaagacg

SEQ ID NO: 5906 - DNA, 242 bp, Bos taurus
  Clone ID: 64-LIB34-052-Q1-E1-H12
cgagaacgaattacatctctgtaatgtgttggcagaggagatcagagatcactgatgcacacagaggcattctcagggttgccgtattgatgtgtccaaaactgagttcatgactgcttcttactccaacacctcttctatttccattgtttcctttccccatgaacatcaccatccactgattagtgccacctacctcccttcatgtcacctccacagtccaatctgtcaccaagctaaat

SEQ ID NO: 5907 - DNA, 207 bp, Bos taurus
  Clone ID: 64-LIB34-059-Q1-E1-H12
cggacgcgtgggctgtctttatccttgaaattcagtaactctgccatatatgtcttggtgttgattattctgcatcagtttttctttagagcagggttctgtgtgatttacagattcattcttgttcagtttcaggaatattttctttaatatttttgattcagtgtttggttctttcactttgcagacacagtcactccatggtag

SEQ ID NO: 5908 - DNA, 205 bp, Bos taurus
  Clone ID: 64-LIB34-067-Q1-E1-H12
gggacccgccgcacagcacactctcgccgcccgcgcggaaggtctctctctccccgactcctggcaccgcatccccgcaccggcgtggatcgggacccgcgctctccagtgcagccagggctcccgagcgtgcgtgcggctggagacgccgagctgctcacgatgaggaggggagcgaggctccggcagagcggcctcgtcccgc

SEQ ID NO: 5909 - DNA, 184 bp, Bos taurus
  Clone ID: 64-LIB34-070-Q1-E1-H8
gttgcagacaaatggcccttcacctctgaaccattcaccatgcatctcccaagaatgaggccattctcctacataccactatgcaagcatcaaattcagggaatgtaacactgaaacagcacagttatcttatctccagtctacattccactcgtcccagtttggctccataatgggtcctttc

SEQ ID NO: 5910 - DNA, 397 bp, Bos taurus
  Clone ID: 64-LIB34-071-Q1-E1-H8
aacagttccaagcagacaggtcctgctagttccctcgctgtgagcaacatggtctatggcaaagtgggcttaccatcacctggacccttcagtggatttttttccctcgtaaaatctggtcttccctttcttgttcttgaagagttgactgtttcgaacccgcccttggtggggaggaaaccgaggtttctgttagctttgtgacttgccctagttttattatacctgctcactagggccagagcaaaaccaggcctctgacctctcagataatttttctacctccttcagtggcctcatttcaacatttttgatcagtcatgattcaagaagccaaatgtaatcatatatgccaaatatactcagactctctgaaacaaggacaggcctcaacatg

SEQ ID NO: 5911 - DNA, 117 bp, Bos taurus
  unsure (89),(100),(109): unsure at all n locations; Clone ID: 64-LIB34-077-Q1-E1-H8
ctgcgcgtgggctgcgccttgttcgtgctggcggtgctgtcgctgctggtcgtgttcctcggggttgccctggtgctgtcctcctctgnggccttcccgnccggcttcngggattct

SEQ ID NO: 5912 - DNA, 150 bp, Bos taurus
  Clone ID: 64-LIB34-084-Q1-E1-H8
gtccaatattttgtacaaaatacgctacttaaatacagtggtcaccatgcagattgtatctgatagttctacgtgtctagttatgtactataatcttgaggagtctgggtcattatgttgtgcacccatcctgataggtgggtagcatac
